United States Patent Application Publication US 2026/0357256 A1 - sequence listing, part 12

SEQ ID NO: 9 - DNA, 58617616 bp, Homo sapiens (residues 23,881,254-26,052,276 of 58,617,616)
  source 1..58617616: mol_type = genomic DNA
aggaggagaaggagtaggaggatagaaggaggagaaaaagaggagaggagaatgaggagaaagaggaggagataagaagagaaggagtgagggaggagtaggagaagagaagtaaaaggagagaagaaggaagagaggagaagaaaaaagagaaaaggaggaagagagaaggaggagtaggagaggaaaaaagaataggaggaggaagaagaggaggggaggagaagggggaggagggaaggggaagagaagaagagaagaaaaaggagatggaggagaggagaaaaaagaaaaaggcagcgagaagaaggagaagaggagaagaaggggaggaggatgaaggaagaaagaaagggaggaagaggagagaagaaaaagtaggatgaagagaaggaggaggtgaagaggagaaggaagaaaaaagaaagaggaagagagaagaaaagggggagaggtgaggaggaggagaaaaggagaaggagaggaggagaaaaaggaaaggaggaagagaagagaaggttaggaggagagaaagaaaaggtgaaggagaggaggagaaaaaggataagagaaggaggaagaggaggggaggagaaggaggaggaagagggggaacaggaggagagagaaagaaggaggtggaggagaggagaaaaagggaaaggaggtggagaggaggagcggaggaagaggaggaagaaaggagaaggagaaaaggaggaagaggaggaagaaaggagaaggagaaaaggaggaaaaggaggaagaggagagcagaaggaggaagagaggaggaggagtggaggggtaggaggagaagaggaggaggaagagagaagtaggaggaggaagaggaggagagaaggaggataagagaagatggatgagaaaaggaggagaggaagagaaaaagaggaggaagaggataggaggaggcggagaggagaaggatgagtaagagaggaagagaagagaaataggaggaagaggacaggcggagtaggaaaaggagggaaggaaaaggagtaatagaacaggaggaagaggaggagaagagaaggaggagaagagaaagaggagaagagaaggaggaggagaagagaaggaggaggagcagaggagaatatggaggaggaaagaaggagaagtagaaggaggaaaagaggagaaaaaaggaaggaaaaggaggaagaggagaggagaggagaaggaggaggagagtaggaggaggagaagaggaggaagaggaggagaggaggaggaaaagagagggagtgcctggtctgtcccacggaccctggctgagcaacggatgaaaggagtactcagacacaggtacacagtgttagagcaactaggggtctgcctggctctagtggccaaagtgcagccccaagaagcttgagctgcttgcttttgttcagtgcaggcacaatgccaaaagccttgagcaaacacagtctgtagataattaacaattattgtttccatttcagggaacgtcacacgcgaggatgttcagaggtcagttcagggacaacttcagacaaacaagcctgatcaagacaacttattcctcactcttttgaacatacttctcaccctattcttcagggttagagaacagcagtcttcagctattctctcccaaagctactcaaagtcttttgacctttcagaaggcctgctcccttcttctacagtttttcccaccactctgactgacctctcacatctccccattttctgtttttttttttcatcaggttttgttgattgaagagtacagatgtgtgcagcaacaggtttgacaggcgcagctgttacagcttgtgttttggctttgcatgctagaattagtaaataacataagataaacatgagtataatcagtaatattctttcccaatcaaagagtgacccgcaggaatggggatctatccaggagagatgtttttgcacattgttatatagggctgttaatgagaaaccccaccatgggtatgttaatctcttctagccaggtagtcacattgttaaaagctgggaaaggggtgtctgcccaggtaatagggtggaagaaaggtggatctagaaggtgggcctaatagagtgtagcaggtatgggttgcaggcagagtgagagaataagaaaaactaataccctacaagagttgcaatgtacaacagacagcatagcaaggaagattatctggagtgaatggtgtttttgtctggagcagaatttgctcagtctcctgagttgtctttttcagcataatgtccagggcctgtattgtctgaggaagccacatcatctggggctgtgggtccagcagggttattttatttttggtaccaggtttggtttcagccacatcgtagtatgacttgatgcatcacactagaatccaaagaggacctgagggaaagtgaacacaagcatatcatcttcccctgttaacaaatcatttggaccacaccatacattactatttacatctttccataaaattgaaggttttatatcttgaatgatttttgcaaagtgctttattatagctgattgaaatttatcatctaaatttaagaaattaagggtaaataaggcttgtgccaatagtattgcagggttgttactcatatcccaccttttttgttttctgagcatatttttaagggtggagtgggcacgttctactatggcttctccttgggagatatacaagacacccatggaatgttggatgttccatttgtgacaaaattgttgaaattgtgagctggtgtaagctggaccattatcagttttaattttttgggccaccccatgaatgcaaaagttaaaagaagaggtttaacgacatatcgggcagactctccgggaagagcaggagtgccaattagatgggaattggtatcaacggatacatgtacatatgttagtttttcaaattcagggacgtgcataacatctgttttccatatctgattaggttctagtcttctagggttaacatctgttgaaggaggggatgtgcctgtgagagggcaatctgggctttgtaaaataatttgtatagctagtttttgggtaagttaaaattgttaagtttctccaattttgctgaaaaaattgatgtgattgggtggcttggtcaagcagtgacatcataacctacaggtctgcttgatcttaggtgtgaactagtggactggacagtgagctgtgggcccgaatctttgtaataaaaataggatgtgtttgttgaaccagcaattgctgaagttggaaaaaaaggacacacagggtgagctcaacagtggacttaatgaaggctgtttcaaggttttgcaataaataaacaaagtagtttatcagtgggaaaggtgcatgttctctttctttttctttttctttttgagacagagtcttgctctgtagcccaggctggagtgcagtggcacatcttggctgactgcaacctccgcctccagggttcaacaaattctcctgcctcagctgtccgcgtagctgggaatataggtgtgtgctaccacacctggctgttttttgtatttttaacagaaatggggtttcactgtgttagccaggatagtctcgatcttctgacctcatgatccaccggcctcggactcccaaagtgctgggattacaggtgttagccaccgcacccagctgagaaggacatgttctatatggcccacataatcagagagttctatctgaaggtatagaggtagggggatgactgctttgaattgctttttacttaagggtattcttacgaaatccaggtcataaccttgcaattgattgcaattgattgactttactactagatagacacagggagatggtattttagtcctggtatgtgagcaaagaacccattctaggaggtgcagccttggggccatctgtcttattaatcctgttggggaatatttagtaggaaatacaaataattggacttaatatcatgggtctatgcaatctagtagcctctgagtaatagcttgctctatttcctcaattttcctttttgcagtggggggtcaaatacctgggtgagtccaagtctgcattgccctttaggatagaaagtaggttctgtaacttatcagtagttatgcccgaggtggggcaaagccagttaatatcacccagtaatgtttgataatcatttaaggtgtgtaagttgttagtattcattcaaccttttgaggtcttactgaccggaaagttagtatgtattcaagatgtttccaagggaaggacatcagtaccttctcaggtactatgattaaacatctaaactgtgtattccttttgacagaggcatataaactcaaaagtattggctccgttggggctgccagtaagatgtcatccatgatcttgcaattaggaaattcttttctactggggagaaaatcctgatttacatgatactgacacatggtaggactgttcagcattctttgaggaagtactttccaatgattcagcaagctggcctttcattatttataactggtattgtaaatgcaaatttttctttgtcttattctgcaaggggaatagtagaaaaggagtcttttaagtcaataataactataggccaatctcaaggaactgctatgggggaagggagcccctgttgaatgggccccataggttgcaaattaacattgatagcaagtaagtcatgaaaaagtctccaattattagacttcttgtcaatgatggaaacaggtgaattccaatagctgtttgatggttctatatggccagcttttaaattgttcctcaactaattcatgggctccttgtaatttctctccctttaaaggccactgttctagccacataggattttgagagagccatgtcagggtaggggaaaaatcaaaacagtggccattaccagaaaggggtctgatattacctcaattaatcctctcataaatgggctagtggctccattttctctaatactttttcttatttcttcataagtgttgaaagcaatgagttcatgtacccaattgccttattgatctcccatcaccaagcaggcccagagctccccttctaatgctgtttgcctaaggcgtggccccataactttagtgtttccctttcattctacccaatttattggagaagggggctcagagaaaatctgtgtctcatctgtggcacctttacctggtaacagtggggctgagggagcaagaggagatattaaggtagatgatggttcttcctcccttcccttttaaggctcttctgtgtagagtggggccagagcagccctatctaaggcccataacattaaagatgctactgggacctgttgtccttgtgcaatttaagattaaatgacaagaatgtcatttaagatttcttctcacttgttcccagagctctaggtctagtgtaccatcttctgggaaccatgggttatggaaaacaatagtttgcattaggtcccttaattggggctccaagaccaaggctctgctagctttaagaagctgtttcaatatctttatatactgttgctgttgagtgaataactgttgttcatttttgagggttttgtcatgatccattgctctgttcctcacacagggcaccaccaatagcctttatagtctcagccatagtcatcctagccactgctagtgttgctgttgcatctattactgaatcagtacaaacagctacctttgtggatagcctggccagatatgtgtctaacgaatttctcctacagcagggaatagatcaaaaaattgttgcacattggcaagcccccaaggctgccttggagtatgtaggaaaataacaagatgtactggcattctgacagcaataatattgggaacataagcatatttgtgtcacctctctaccatggaatcgatcaatacaaagttgggatgaggtgaaacaacaactctgtggaaccttacatgataatgtaacagcagacgtaaagcaacttaaaacaacagttctagaatccctaaacactataaatctacacacccaacaagcagccatatggaaggatgtgcaagaacatctctcctaatagaccccctctcctgggggaccctccactccttgattggaaaagaataatactgattatattcatatttgtcttatgttatttagtaattctaggatgcaaagcctgaacacaagctataactgctgcacctgtcaaacctgtgcctgcacatctctgtactcttcaatcagaaaacctgaggcaaaaaagggggaaatgtgggagatcgatcacagtgatgcaagaaactatagggaaaagaacaggccttctgaaaagttggaaggctctgcatagctttggggtacaatatctaaaggcagttgttctctaaccctgaggcagagggtgaggagtatatgcaagggagtgaaggggaagttatcttgatcaggcttgtttgaagttgtccaggaactgacctttgatcatccacactggtgatgtttcctgaaaggggaacaataaacgttaattaccggattgtgtttgctccaggcttttggcattgtgcctgcactgactaaaagcaagcagcttgaacttctcatgactgaactctggccacttgagccagatagtcccctagctgctcttacaatgcatatctgtgtctgagtactcattttatccatcggcaagggtctgtggggcagacccgcactcgccctgtcacccaggctcaagtgcaataacatgatctcggcacactgcaacctccacctcctgggttcaagtgattctcctgccttagcctctggagtagctgggattgcaggcatgcaccaccacacccagctaattgttggtatttttagtggatacagggtttcaccatgttgaccaggctggtctcgaaatccggacattgtgattcacccacctcagcctcccaaattcctgggattacaggcatgagccaccatgctcagtgggtaatattgccttttttgcttgggctgtgcccttagaaggcattgagacatactgctgagcccaccactaacatgatgtgagttctctgcctacccctgaccacaggaagcattgtgacatatttcttgacccattacaatctctcctatgagcaaagctcaggtaaatgccctttttacctatgtgacgtgacatttctcttctgcctgggccatgcccacagattagagagtgacttactgctgaagcaagaaaaacagtgatgtaattattctgcctggtccctgcacacaggagtcactgtggtatatgtttaggcctcccacctagatgatgtgactcttttcttctggggtttgtcctcagtgggaattctgatatgacacgacatagctcctatgagatgtgactcttcctcatttttagcttcttctcactggggtgataggaacataaagctaagccaagcacctaggctatgtctctcctcttatttaggagccctacccacaagggacattgtgacatagctctaggcttctcaccttggtaatgtgactttgtgcctaggccctcccctcaggggtactgtgaaatactgctggaccaagaacctaggtgatgtgactctctgttactgcttggagtgtgcttaagaagaaattgtgggctgggtgcagtggctcacacctgtaatcccatcactttcggaggccaaggcaggcggatcatgaggtcaggagattgagaccatcctggctaacacggtgaaaccctgtctctactaaatatacaaaaaattagccaggtgtggtggcgtgcacctgtaatcccagctactcaggaggctgaggcaggagaatggcatgaactcgggaggcagagcttgcagtgagccaatattgcaccactgcactccagcctgggcgacagagcgagactccatctcaaaaaaaacaaaacagaacaaataaaaaaaaaagaagaaattgtgatgcacatttatgtgcatccagcacctgagtgatgttactctcctgtccttcatgagacctgcatgcatcatgtatttcaacatatctgtgggtctaacaacatggtgatgtgactttcctgcatgggctctcacacagaaatattctaacacaagtttttatttattatcttggtgatgtgacttttcttttctgcttgagcactgccaaaagaaaagattgtgacaaatcgctggacccagcacctaggtgatgtgaatctcttcacttgcctgagaggtgcatattttggttattgtgacatatcactgaaacaaacacgtaggggttggaaggcttctgcctgagccccttccacagagggccttggaatatattttttttatccatcgctgggagatgaaaccctctacttctacctgcattcttcccatagagaagatggtgatatattgctgggcccagcaaccaggtgttttgtctatcttttctgggctttgcctacagtgagccttgtgatatatttagctgagcccagcacccaggtgatcgtactcttcttcctgtgccctgctttcaggagaggattgtaacatctctggttgaagaccctgtgatgtgactctcctgcctggtgcatactctcaggaaagattgtgacataaccctggcccaacacacagttggtgtgaccctcgtgcttgttctctactcacaggtggaattgtgacatataacttggtcaagcacacagatgtaatgatgactttcaacctcgaagagccagtaggagagataacgttgctcatagctacttttaggaaaacaaaaaatcctgggttttccttctgtaaaaatgtcatagagaattaccactctctcacatatataaggccccagtgtgtcacagacaatgtcataacagagttcaccatacagatgagattgtgtttgtcctatgcacagcccagcaacctttagaattgtcaccatcacacatggacagagcccactggtggggccctgaatctcacatgaatgcactccacagttggaactttgtcatatgtgaacatctggccacagttgagatggtgactcatttcttttcttttttttttttaagtgccaagttattctttttttttaaattttttttttattatactttaagttttagggtacatgtgcacattgtgcaggttagttacatacgtatacatgtgccatgctggtgtgctgcacccactaactcatcatctagcattaggtatatctcccagtgctatccctccccccctccccccaccccacaacagtccccagagtgtgatgttccccttcctgtgtccatatgatctcatttttcaattcccacctatgagtgataatatgcggtgtttggttttttgttcttgtgatagtttactgagaatgatgatttccaatttcatccatgtccctacaaaggacatgaactcatcatttttgatggctgcatagtattccatggtgtatatgtgccacattttcttaatccagtctatcattgttggacatttgggttggttccaagtctttgctattgtgaataatgccgcaataaacatacgtgtgcatgtgtctttatagcagcaagatttatagtcttttgggtatatacccagtaatgggatggctgggtcaaatggtatttctagttctagatccctgaggaatcgccacactgacttccacaatggttgaactagtttacagtcccaccaacagtgtaaaagtgttcctatttctccacatcctctccagcacctgttgtttcctgactttttaatgattgccattctaactggtgtgagatggtatctcactgttgttttgatttgcatttctctgatggccagtgatggtgagcattttttcatgtgttttttggctgcataaatgtcttcttttgagaagtgtctgttcatgtccttcgcccactttttttgatggggttgtttttttcttgtaaatttgtttgagttcattgtagattctggatattagccctttgtcagatgagtaggttgcgaaaattttctcccattttgtaggttgcctgttcactctgatggtagtttcttttgctgtgcagaagctctttagtttaattagatctcatttgtcaattttggcttttgttgccattgcttttggtgttttagacatgaagtccttgcccatgcctatgtcctgaatggtatcgcctaggttttcttctagggtttttatggttttaggtctaacgtttaagtttttaatccatgttgaattgatttttgtataaggtgtaaggaagggatccagtttcagctttctactatggctagccagttttcccagcaccatttattaaatagggaatcctttccccattgcttgtttttctcaggtttgtcaaagatcagatagttgtagatatgcggcattatttctgagggctctgttctgttccattgatttatatctctgtttttgtaccagtaccatgctgttttggttactgtagccttgtagtatagtgtgatgcctccagctttgttcttttggctcaggattgacttggcgatgcgggctcttttttggttccatatgaactttaaagtagttttttccaattctgtgaagaaaggcattgatagcttgatgaggatggcattgaatctgtaaattaccttgggcagtatggccattttcacgatattgattcttcctacccatgagcatggtatgttcttccatttctttgtatcctcttttatttccttgagcagcagtttgtagttttccttgaagaggtccttcacgtcccttgtaagttggattcctaggtattttattctctttgaagcaattgtgaatgggagttcacttatgatttggctctctgtttgtctgttgttggtgtataggaatgcttgtgatttttgcacattgattttgtatcctgagactttgctgaagttgcttatcagcttaaggagattttgggctgagacaatggggttttctagatatacaatcatgtcatctgcaaagagggacaatttgacttcctcttttcctaattgaataccctttatttccttctcctgcctaattgccctggccagaacttccaacactatgttgaataggagtggtgagagagggcatccctgtcttgtgcccattttcaaagggaatgcttccagtttttgcccattcagtatgatattggctgtgggtttgttctagatagctcttattattttgaaatatgtcccatcaatacctaatttattgagagtttttagcatgaagggttgttgaattttgtcaaaggtcttttctgcatctattgagataatcatgtggtttttgtctttggttctgtttatatgctggattacatttattgatttgcgtatagtgaaccagccttgcatcccagggatgaagcccacttgatcatggtggataagctttttgatatgctgctggattcagtttgccagtattttattgaggatttttgcatcaatgttcatgaaggatatgggtctaaaattctcttttttggttgtgtctctgcctggctttggtatcagaatgatgctggcctcataaaatgagttagggaggattccctctttttctattgattggaatagtttcagaaggaatggtaccagctcctccttgtacctctggtagaattcggctgtgaatccatctggtcctggactctttttggttggtaagctattgattattgccacaatttcagatcatcttattggtctattcagagattcaacttcttcctggtttagtcttgggagagtgtatgtgtccaggaatttatccatttcttctagattttctagtttatttgtgtagaggtgtttgtagtattctctgatggtagtttgtatttctgtgggatcagtggtgatatcccctttatcattttttattgtgtctatttgattcttctctctttttttctttattagtcttgctagcggtctatcaattttgttgatcctttcaaaaaaccaacttctggattcattaattttatgaagggttttttgtgtctctatttccttcagttctgctctgattttagttatttcttgccttctgctagcttttgaatgtgtttgctcttgcttttctagttgttttaattgtgatgttagggtgtcaatttttgatctttcctgctttctcttgtgggcatttagtgctataaatttccctctacacactgctttgaatgtgtcccagagattctggtatgttgtgtctttgttctcgttggtttcaaagaacatctttatttctgcctttatttcgttatgtacccagtagtcattcaggagcaggttgttcagtttccatgtagttgagcggttttgagtgagattcttaatcctgagttctagtttgattgcactgtagtctgagagacagtttgttataatttctgttcttttacatttgctgaggagagctttacttccaagtatgtggtcaattttggaataggtgtggtgtggtgctgaaaaaaatgtatattctgttgatttggggtggagagttctgtagatgtctattaggtccgtttggagcagagctgagttcaattcctgggtatccttgttgactttctatctcattgatctgtctgatgttgacagtgggctgttaaagtctcccatttttaatgtgtgggagtctaagtctctttgtaggtcactcaggacttgctttatgaatctgggtgctcctgtattgggtgcatatatatttaggatagttagctcttcttgttgaactgatccctttaccattatgtaattgccttctttgtctcttttgatctttgttggtttaaagtctgttttatcagagactaggattgcaacccctgccttttttagttttccatttgcttggtagatcttcctccatccctttattttgagcctatgtgtgtctctccatgtgaaatgggtttcctgaatacagcacactgatgggtcttgactctttatccaatttgccagtctgtgtcttttaattggagcatttagtccatttacatttaaagttaatagtgttatgtgtgaatttgatcctgtcattatgatgttagctggttattttgcttgttagttgttgcagtttcttcctagtctcgatggtctttatattttggcatgattttgcagtggctggtaccggtttttcctttccatgtttagcgcttccttcaggagctcttttagggcaggcctggtggtgacaaaatctctcagcatttgcttgtctgtaaagtgttttatttctccttcacttatgaagcttagtttggctggatatgaaattctgggttgaaaattcttttctttaagaatgttgaatattggtccccactctcttctggcttgtagggtttctgccgagagatccgctgttagtctgatgggcttccctttgagggtaacctgacctttctctctggctgcccttaacattttttccttcatttcaactttggtgaatctgacaattatgtgtcttggagttgctcttctcgaggaatatctttgtggtgttctctgtatttcctgaatctgaacattggcctgccttgctagattggggaaatactcctggataatatcctgcagagtgttttccaacttggttccattctccccatcactttcaggtacaccaatcagatgtagatttggtcttttcacatagtcccatatttcttggaggctttgctcatttctttttattcttttttctctaaactttccttctcgcttcatttcattcatttcatcttccattgctgataccctttcttccagttgatcgcatcggctcctgaggcttctgcattcttcatgtagttctcgagccttggttttcagctccatcagctcctttaagcacttctctgtgttggttattggagttatacattcttctgaatttttttcaaagttttcaacttctttgcctttggtttgaatatcctcccgtagctcagagtaatttgatcgtctgaaggcttcttctctcagcttgtcaaagtcattctccgtccagctttgttctgttgctggtgaggagctgcgttcctttggaggaggagaggcactctgatttttagagtttccaattttttctgttctgttttttccccatctttgtggttttatctacttttggtctttgatgatggtgatgtacagatgggtttttggtgtggatgtcctttctgtttgttagttttccttctaacagacaggaccctcagctgcaggtctgttggagtaccctgcagtgtgaggtgtcagtgtgctcctgctggagggtgccccccagttaggctgctcgggcgtcaggggtcagggacccacttgaggaggcagtctgcccgttctcagatctccagctgcgtactgggagaacccctgctctcttcaaagctgtcagacagggacatttaagtctgcagaggttactgctgtctttttgtttgtctgtgccctgcccccagaggtggagcctacagaggcacacaggcctccttgagctgtggtgggcttcacccagttcgagcttcccggctgctttgtttacctaagcaagcctgggcaaaggtgggtgcccctcccccagcctcgctgctgccttgcagtttgatctcagactgctgtgctagcaatcagcgagactccgtggggtaggaccctccgagccaggcacgggatataatctcatggtgtgctgttttttaagcccgtcggaaaagcacagtatttgggtgggagtgacccgattttccaggtgccatccgtcacccctttgtttgattaggaaagggaactccctgaccccttgcacttcccgagtgaggcaatgcctcaccctgcttcagctcgcgcacggtgcgtgcacccactgacctgcgcccgctgtctgtcactccctagtgagatgaacccggtacctcagatggaaatgcagaaatcacccatcttctgcgtcactcaggctgggagctgtagactggagctgttcctatttggccatcttggctcctccagatggtgactcatttctaaaccctcctcataggaaggtgaggactctctcatctagactcagccaattagagagatgttgactctgggcttagaaccatagaaaagattctggattcccttcttgtacgaaggtcacagaggatcaccactcttgcatattgtataaagccctcaggtgacatggtgagtgtcataggagttcacagcacacaggtgagataatgtgtcttgaatgcatgcccaagtgacagtaaagattgtcattctcccacataaacatatcccactgttgaggttctgaatctcagacatggaggctgtgaaagttggagaattgactctcctatatggcctgggccacaggtgggctggtgaacttcagaccaagaattcagcacacatatgaggctgtgactgcactaacagaacacagtctgcagaagaaatggtagctcttttgcaaaaattctgtcagctattgagattgttactcatgaacttagacccatcatacaggaggtgttgactctcatatctagaacatggacctgtatggaatatctaatctcattcctggactttcctgcaggtgtgattgtgcctggtaagcattttagtgatttgactctcctgccttggctcagccctcagatgagactgtgacatatctctggactctgcacctcaaagaagtgactcgcttttccaggcttggtgttgcccacaggtgtcatggtgacatatggctgggccttccacccaggtaatgtgagtcttttcttgctttgtcactgcccacagggtgcattgtgatatattcctaaattctgcacttaggttacatgactccattttttttttttttttttgcctaagccctgagtattttgcatagtataacatattaccaggcccaacacctataaaatgggaggcttctgcctgggcctttcaacagagggccttgtgacatatctctgcatcaatcacctaggagctgtgactttctgttattgcctttactctgctcacaagaaaaattacgaattatcactaggcccagctaccaggtgatgtgtctctcttgcatgggtcttgactatagaaagcgttattagctattgctgggctcagcacccaggtgatgtgactctgctgcctgtgttttgctttcaggagaaggttgtaacatattcctggctgagtattaaagttatgtgacactcctgtctgatccctgccctcagtaaagattgtgatgtattcctggccaaaaacccaggtgatgtgactctccttctctctgcctattcacaggtgggattgtaaaatatagtttggcctagctcacaggtgcaatggtgactttcatacctctacccacctaacaggagagatgctgtcttttgtagctaggcctatggtaatgattataatcctgagtctcccttttgtacaaagtcataggaaattaccaatttcttgcatactatataaatctcttgtggtacagagagtgtcttcccagggttcagcacacagggagattgtagttcttatgtgcaatgtgcacagcccaccagctgttgggattgtcaccctcacacttggatagagcacactggtgaggccctgaatttcacacagacacagtccacagtagaaactgtgaactctcatatgtgaacatccagtcagggttgaaatgatgactgatttatgaacccagtacattggaaggtgagaattctatctgaacccatgaaaattctacctgggcttagggctagagtgaacacagtttacaggaggaatgaagggtctcaagctccaatccagttcattggtgaggttatcactaccttacttagacccaacatagaaaatgtggtgactctcatacctagaactgagacctgtgcaggattgttaattcactactggactttcctgcacgagtgattattacatatgcctatgttcagccctgagtgatttgattttgctgcatggtcccagtctgaaggtaagattgtgattcatcactggatccagcacctcggtgatttgactcttctttttttggggaccccacaaattttaagtattgtcaattttggctgaatcctgcacccatgttatatgactctcccaaatgtgccttacatgttgtgccgtattggggctcaatatatcacattagacattgttacatattgctgggttcaacacccaggtgatgtaacttttttttctgggactgcctgcaggggaccttgtgacataactcaatgtccatcaccatactgacgttactctcttctcctgcctggtctctgctcacagagaaattgtgacagattactggcctagcatctaggtgatgtgactctcctctttttctcaggctctacacatttgggtattgtgacatattgctgaactcaactcctaagggatgggagtctcctacttgggaccttcctacaggggacattgtggcatgtctctgcattcctcacctagcagatgtgactctcctcttctgcctgcaccctgcctacatggaaagttgtggcacattgctgttgtcagcaaccagatgatgtaattctcctgcctgggtctttattacaggaaagatgattgacatattactgagcccagcatccaggtgatgtgactctcttcttcttctggtccctgcttacagagaaattgcagcatattgctacactcagctcctagcttatgtgactcttttattcatttaggttttgccttcaggtgacattgtgtcataatgctggtccctgccctgacaatttgtgactcttctgcctgtgatttgcccatttgggccattgtgacatgttgctggattcaacactcaggtgatgtaacttttatgtctgggccttgcctacagggtcattttgaaatgtctctgtggctgggcgttgtggctcaaacttgtaatcccagcactttgggaggatgaggcaggtggatcaaaaggtcaggattcaagaccagcctggttaatatggtgaaacactgtctttactaaaaaaattaataataattacaaaaagcagctgggtgtggtgatgggcatctgtagtcccagctactcggggggccgaggcaggagaatcacttgaattcaggaggcagagtttgtaaagatcacacaactgcaccccagcctgggtaacagagtgaggctccatctcaaaaaaaaaaaaaaaaaaaaaagaaagaacgaaatgtctttgcaccaatcccacagatgatgtgactctcttgtgttaccatgtctctgctcacaggaagaactgagacattttacagcatgtagctgatttttgttgttgttgttgttcctgcaggaaagattgggcactgttactcaactaggcaccagaaagatattattttatttttcttagtcctgcccatgtaagacattgtgtcatgttcctgggccctacacgaagatgatgtgagttttctgtccatcaactattttatgtgactctcctctcttaccttcaccttgtccataggttagattgtaatatatctttgggcctgggtcacgctaagagaagtgagagtgacttattgctgggcccagcacacaggggatgtgattcttccacttggttcctgcccaattggtcattgtgacatatctctgagccaatcacctaaatgataggtctcttcttatctttctggacctgtccacagtaggaaatgtgacatatcactgggccaagcacctatgtgatatgactctcctctcaaaccaagcccttgcctgatgtaattgtgccatatagctgggcccagctgctacattagctgacctcatttttttcctgagccctacaaaacaatagcattataagatatttctgggccttttatctaggtgatttgacttttctgtctggtatgtcctctgaggggttattgtgacatgttgctgggtgcagcatttaggtgatgtgacttcctctactgcttggtctgaccaaaaggggattgtgatgtatcactgggcccagaacttatgtgatgggactcttttctcttgtctaggccctacaaacattttgcattgtgacatatagctgggtctgccacccaggtgatgtgagacttctacataagccctgaccacaagagtattatgaaacatcttttcattcatcacctaggtagtgatgtgactcttcttcagcctctacactgccacaagggaattgtgatgtatcactggacccagcacctagatgatgtaagacatcttttgactggaccttgcatattttgcatattgttacttttactgggtctgacattatgggatgagaggctcctgcctgggccctgccaacaggtggccttgtgacatattttggcatccatcacctatgaaatagggctctcctcacctacatgcaccatgcacaaagagaagatggtaacatatcactgggatcagccaccaggtgtgtgtataaccactcagggtgtttctcaaagacagcattgtagtgtatcactgggcccagcacctaggtaatgtgacttgtggcctgtgcacatcttttctttctctctttcctttttttttttttttgagacagagtctcactcttgtcacccaggttggagtgcagtgatatgatcttggctcactgcaacctctgcctcctgggttcaagctgttctcctgccttagcctcccatgtagctgggattacaggtatgcattgccacactgggctaatttttgtatttttagtagaggtggggtgtcaccacattggccaggctggcctcaaactcctgatgtcatgtgaaccacttgtcttgatctcccaatgcaagagccttccctcttgtctgggtataagccaatgcacccagtctgcctgtggccatcttacaggaataaattctaatgcatccctggccaagcacctaggtgatgtgatatgactctactctctggttcttgccctcagaaaagattgtgacatgcctttagaccagccccagatgacgtgactcttctgctcacttcctactcagcagcataattgtgacatatatcttgccccagcttgcaattgctatgttgattctcacaccttgaaccaggcaataaaagagttgcactctctcctagttaggcttaggaaaacaaacacgatccttagtcttttcgttttgccaaggtcatagagaattaccacgccctcaaatactgtataaagcccttgggtggcacagagagtgtcatcaagggacaaaaacacagatgatattgtgtttcttttattttcttttttttctttggagatgggagtctcactctgttattcaggctggagtgcagtggcacgatcttggctcactgcaacctccacctcctgagttcaaatgattctcctgcctatcctcctgagtatctgggactacaggcgcatgccacgaagccgagctaatttttgtaggggttttaccatgttggccaggctggtcttgaactcctcaccttaggtgatctgcccgcctctgcctcccaaagtgatgggattacaggtgtgagacactgcacccagccaaagtttgtgtttcttaaaagaacttcctgccgcctgttataattgtaacctcaacatggacagagcccactggtgaggtcctaaatctcatatgcagatgcagactgcagttggaattgtgactgtgatatacaaacatccagccaggaatggctcatttctaaagctacaaatgatgactctcttctaaatgtagctcataggcaggtgaggactttcctaaatggatcagccagttggaaagatattgactctcattcctgggcttagagtcacatgtagtatcatgggtccatatcatcacaaatgtcttagagtagattgcgactcacatgcgtattgcataaagtgtgggggatcagtcagagtggtgaaaagggaactataaatgttaattacctacaggttgtgttggctccaggtatttgacattgtgcctgcactgaataaaagcaagcagctccagcttctcggtgctgaaatctggccacaagagctgggcagttccctagctgctttaagactgcatacctatgtctgagtacttatttcatctgtcagccaggatgtgtgggacagaaccagcaggtggtgccccatgtgggaagcaacaaaatggatcatgacggaaccctcaaaaatgaaagggaagtgactgcacagtaagtaatttgtgtccactggggatttccaagttcaaaggaattttttcaagccagggttttatttattattattattattattattttgagatggagttttgcttttgtttcccaggctggagtgcaatggctcaatcttggctcatggcaacctccacctcccaggtttaagtgattctcctgcctcagcctcctgagtagctgggattgcagacatgcaccaccatgcctggctaattttgtattttttttgtagagatggggtttctccatgttggtctggctgatcttgaactcctgacctcaggtgattcactcacctcattctcccaaagtgctgggatcacagacatgaaccattgtgcccagactcaagctagggctttatcatgtgacaacaattatcagctcaacagcaacagtatataaaaaattgaaacaactgctaaaagctagtggagcctcagtttcaaaggctcaattaagggacctaatgcaaactgttgttttccatagcccatggttcccagaagaaggcatactagacctagaactctgggaacaagtgagaaggaatcttaaacattatgcacatgggcaacgagtcccagtaacatctttaatgttctttaatattatgggccttagttagggctgctttggccctgctctatacagaacagcctaaaaagggaagggaggaagaatcatcatctaccttactgcctcctcatcttcctcctcctcctcctccctcagcctggttgttaccagtaaaggtgccacagaggaggcagagatttttcctgagccccctctcccaataaattggggaaaagacaagggatacattacagttatgggaccctgtgttaggtaagcagcattagaaggggagctcttggcctgcccaatgatggaagatcaacaaggcagtcaggtacatgaacccattactttgaagacttataaagaaaaagcattagagaaaatggagccactagcccatttaggagaggattacttgaggccatagcagaaaactaccatatgaccccatgggactggtcaatattagctaaaacaactttagaggccagtcaatacctcctctggagggcagaatatgatgagttatgtgaacaacaagttaaccagaatcagttgggccaggcaaaacataacagctactatgctccaggggaggggtccctatgttaatgtataacaacaattaaatttttcctccaagcctatgcacatgtgtctttgtgcactcacagggcctgggaacgaattcccaaaggcagagtccaacagagatcttttgtaaatgtatgacaagggccccaggagccatttgttgaatttatcaattatttaacccagataacagtggaatgtacccattccacccttaagagtatgcttaaaaaaccaaaaacgggaatatgagtaggaaccctacaacactattagcacgagccttatttaccctaaatttcttaaatttagataataaatttcagtcagccatagaaaagcactttgcaaaaacctctcaaaatataaagcctcaagttttatggaaagatgtaaatagttgttgggaacaagcccccaaatctggccataaactggccccaaaactggccataaacaaaatctttgaagcactgtgacatgctcgtgatggccatgatgcccatgctgaaagttgtgggtttactggaacgagggcaaggaacacttggcccacctagggtgggaaaaccatttaaaggcattcctgaaccacaaacaatagcatgagcaatctgtgccttaaggactgattcctgctgcagataactagccagagcacatctctttatttctcacaaggaatatttttagttaatctataatctatagaaacaatgcttatcactggcttgctgccaataaatatgtgggtaaatctctgtttggggctgtcagttctgaagtctgtgagacccctgatttcccagtccacatgctatatttctgtgcgtgtgtctttaattcctctagtgccactgggttagggtctccatgactgagctggtctcggcaaatagtaatgtatagtgtggtccaaattatttgttaatgttgggaagaggatatgcttgggttcacaacccctcagcctctttggattccagcgtgacacaccaaaccttaccacagcatggctaggacccaaccccgtaccaaaaatgaaggaaattatcctgcagaacctgcaaccccagacaatgccactttctcagacatcacaggccccagacattacctgggggatgctgaagaagacaactcaggaggctgagtgaattctgctgcagaaaaagaaaccattccctcagataatgtgttcctttctatgctttctgttgtacattgtaactcttgcagggtattgattcttcttattctctcactttgcctgcaacccatacctgctatactctattgggcccatcttctagatccacctttcttccgcactgctacttcggcagagaccctcttcctagcctctaaaaatgcgactgattggctggaagggattgacatacctctagtgggggtccctcagtaatggcatacattggactgaggtggcaagtaccattacatatcactccttgattgtaaaagaataatattgattatactcatgtttgttttatattatttactggttctaagatgcaaagctggaacacaagctgtaaccactatgccagtcactgctcacatctgtatgcttcaatcatcaaaacttgatgcaaaaaaaaaagaggggaaatgttgggcttgggggggtgtcggtcagagtggtgaaaaatctatagggaaagaatgcaaacctcctgaaagtttggaaggtcctgcagagccccaggggataatagctgaaggcacctgttctataaccttgagtcagggggtgaggagtaaatacaagggagtgtgggggaactttatcttaaagaggcttgtttacttatgttgaccagaaactgacctttgatcatttgcacatgtgatgtttcttgaaaggggaacaataaatgttaattacctgcaggttgtattggctccaggttttcggcattgtgcctgcactgaataaaagaaagcagcccagcttctcagggctgcactctgtccaatatagccaggcagtcgcctagctgctcttacactgcatacctgtgtctgagtactcatttcatccatcagccagggtctgtgggacagacccagcgataaagccctcaggtaatatattgaatgcccttatatggtccagcacacaggtgacattgtgatactggtattcacaaccagtcaacagtaaatacgtcatccttttagataaacacaatctacttctgaagttctgaatctcatccctggaggaagtggaaagctgcaaaattgactctcacatgtggatctggtccacagctaggctgctgactcagatcaagattcagcacacctgtgagactatggcgtttactgaggagacacagtctgaaggagagaatgagactcttattcataaacctgtccacattgagattgtgatttgcatacttagacccaacctccaaatggtcttgactctcatacctagaatgggaatatgtgaaaagttattcatgctatccctgagtctttctgcatgtgtgattgttacacacatctctgttcataacctgagtgatttgacactcctgcctgggccctgcacacagatgggattgggacatattgttggaaccagtatgtagatgatgtgaccctaaactcatgccttggtgctgccaaagagggcattgtgacatatcactggtccctgcacccaggtaatgtgcttgtcctttctgtgccctgcccacattggctactgtaacatatccctgggtctaacacccaggagatatgaatctctgccctagaccctggctacaggaggcattttgccatattcctggacccatctatttgatgggttactttccactcttacatgggcttttccctaggagacatatgtaatgtttctcttttctcctatctggacccagaccacagaagcgagagtgactaatccctagtgacatttcacaggtgatgtaatttttctgccttatacctgtccacagaggacatagtgaatgtccctggcccactaaactggattatatgactttttatttttgtctcagaactgtcaacagtggggattgtgacagatcactcttctcagcacttacataatatttttcccatccttgggcactgcccactggggtgattgtgacatataactaggtgaaggccctaggttatgacttttctcttcgacattagccttgcccacacagggtgttttgacatatctctgaagctctaatttaggtagactgctgcatgggctcttcatttttcagggagtattgtcccatatttttttcacctagtaataaggtgatgttactctcttctagtgcttgggctctgcccaaaaagggcatatttcaaaagttccatcacctaggtgttgggtccagccacatttcaatatacaaattgtatattgtgtatgttaaaaactgtgtatattgaaatacggctgggtccaacacctatgtgatctaactctcccacgtgagcccttccaataggggaattatgacatattttgtttatcacctaagtgatgtaactctccttttctacctgagccctgtataaagggagaattgtgacatatcactggacccagcatctggtgatatcaccctcttttttcttttcttttgtcttttttttttgagatgacatctcactttgtatcccaagctggagtgcagtggtgtgatcacggctcattgcaacatccatctcccaggttcaagtgattctcctgccttaacctcctgagtagctgggattacaggtgtgtgctaccacagctggctaatttttgtatttttagtagagatggggttttgccatgtttgccaggctggtctccaactcctgacctcaagcgatctgccagcctcagcctcccaaagtgctgggattataggcatgagccactgcaccagcccttatcactctcctctttcaaattggccccatctattttaggtattaaaacatattgctgggtcaaatcaagtgggtgagaggctctagcctgggccctgcccactagaggccttgtgacatgtctctgcatcctttactttgaggtatgactttcctcttgcatctgcatcatgcccacacagaagattgtgatatacttctgggttcagcaaccaggtggtgtttttcttgtacccaggtcttacctgcagaaaaaattgtgacatatagctgggcccattacccaggtaatatgtctttgctgtttgtgccctgctttctggagaaaattgtaacataaccctggccaggcaaccaggtgatattactctctgcctggtctctgccctggaaaaattgtgacatatttctgacccagcacccaggtgatgttagtcttttgtttttttctactcacagtttgggttgtgacatataccttacccaagctcacagttgtgatgatgacacaaataccatgaatcagccaaaaggagagatactggcacttgtaactaaacttagagaaatgggaatattcctgtgtcttctctatataataacatcatagaggattaccattctttcacatttatattaagtctttggatggtacagagagtgtcatcacagaaccaagcacacaggtgagactgtgtttcccacatgcacaacctaccaaatgttagcaatgtcaccctgacacatggacagtgcccactggagagatactgatttcacaggtgagtgcagtccacagtaaaaattctgactgtcatatgtgatcatgcccccagagttaatatagtgactcatttctttctttcttttttttttttttttgagacagagtcttgcactgttgccaggctggagtgcaatggcacaatctcagcccactgcaacctacacttcctggttcaaatgattatccagagtagctgggattataggtgcatgccactagtcctggctaatttttttttttttttttttttttttgtatttttagtagagatgggatttcaccatgttggtcagactggtctcaaaatgttgacctcaggtgatccacccactttggcctcccaaagtgctgggactaggggcaattgtttaaagatattttgtttctgactagcagtctcacccattatttctttattctgaaatttctaaaacaaaagaatatatgtagccaatcaataacttatgcatttaagtatgaattcttggtaaataacttagggactggcttctcacttttttgaaaagactcactttcaatggctgttaattgaaatatatattcagggcaacttaaatctgtcctcctgatggccatcctcaatatcagatcttgagtaaatatatttcagattacattttaactttttgattattttaagttgactcagggctggcctggaacattctcctgggtgtaaatactctgactataagctacctgctcagtagaggaaactaatcaacagcatggcctagcatagttcaaagacacatgtggtgagaagctcactggggcctggctcctaattgcaaggacagttgcacaggtgtgtctgaatgcttggtgagcctggcctttcctcacccaatgtctctcaccagccatttcaaccacatcttggccttctgtcattctgttctctggggtgaaaactcatcttcagggctgtctacaacaaaagagaaacatcagattaccaaaacctcaggaatagggattacagattggattaagagcctgcgctttcttaaggatgatatgtatggaaaatcagcaaataatttcagaatgatacaagaaaaaatgcctctaataggtattcatactatagttcaactcgatttgttctgtacatggtagggaaaatgggataaaatatcgtaagttcaagcatttttgctgctcagtcagaatgaaaccctgcagcaggcatgggcatgtttcatgagagaaatagaataaaaagagttagacaatatgatcatttattgcaagccccctgccacttgattcagtgagcatttttgggtgaagtggaacctctttctgtcaggtctgaaggttcagatgtgtcggtcctatctgcccctagttcacctgaaagttctattgagaaccctttgtccctcctccttacccttctagttcctctctacacccaccacgccctgaagaatggaactcagtgggtactactagtagtggggctgcctatcaacctccaaaaggaaatctttgtccacttagagaggttgcaaatggggaagaagtcattgtgagaggacatgtccccttttctatgtctggtttggctctataataagacaagtttggtcatttctctgaagatccagaaaaattcatagatgagtttgaaaagttaactctgacctatactttaacttggcaggatctgtatgttttgttgtctctgtgttgtacgtggaagagaaacaatgcattttggggacagctaggactcatgcagatgaggtattggcttgcagcctgaaccataatatatatcagacaggaggtatagcagttccagattaagatctacgatggaatatcaaaggggcagtgaggacttgggagaagagatcatatggttacttgtttgttggaagagatgaagaaatgtaagaaaaaccttgttaacaatgaaaaggttaaggaagtttctcagggcaaagacgagaatccagctttgtttcaatagcatttagttgaggcaatcaggaaatatactaacatggatcttgcctcaaggtaaagataaacccttctgggagtccactttataacccagtcttcctctgatatccatagaaaactagtaaaagcagctatgggtccccaaacttctatgaacagctttggatatggcatttttagtttttaataacagaggcaaagtggaggaaggagaaagaggaagaaggacctccacaaggtgcagcttttggctgcaaccttaagcttacctcccatatgggaggttgccttcctaggtcttggcttgaacaagggaagctgaaaggtgaaaagcccaaagctgggaatccgagtcactgtgctttgggcataaatcagtgtgcacactgtaagaaaacaggccattggaagagggatagtccagtgttctgaagagagccgtcagcacccaaactaatgatgggtgaaacagccaggcaagtgcccaagagtgacggggcctgagaccttccatcacagcttccatcagacaactagccatatatctggagaagcctcagtaacctttgccatggcaggtaagaatattaatttttgccaggtgtggtagctcacgcctgcaatcctagcactttgggaggccaagatgggaggatcacttgaggtcaggagtttgagagtagcctggccaacatggtgaaaccccatctctactaaaaatacgaaaaaaaaaaaatctgggaattgcttgaatccaagaggcggaggttgtggtgagctgagattgtgccactgcactccagcctgggcaagagagcgagactctatctcaaaaaaaaaaaaaaaaaaaagaaaacaaaaaagaatattaactttcttctggatggcttactctgttttgacccatataatgggtctctgttgccccaaaacttcatggtcacaggggtagactgagaagcctatagatgccattttacctattctccatgctgtttttcagagaccttggttttcttacacaactttcttatcatgcctggatacctcagggcagttgcagcaacttctcttttggtagatgaatccaataaactggctttagaacaacacctggaagttaaaacccacaccaagtacaaggagtcctagaagctaaaggacaccagtggatgacagggggacgcttattgaaatagcaggcattttgctagacactcctgataaactactgatatgaggtgctaatcaataaaaaatagttaaacatttgcatgactctacccatttgggaagagattccctgtttcaaataatgtcttggctttttatagaaaaaggattacttaaaacagtaaactaggttacttgagcctgtgaaggatgtgtctggaataacccaaatgaccaatgtttacctcctcctttagtaaggcctattcagcatagacgaacataccctggtgaagactggcaaatagactatactcagatgaccccatgtaaagggtttaaatatttattagtattcattgacacctttggatcgaggcttttcctacccgatctgaaaaggcaattgagattcccaaactcctgctaaaagaaataattacacccctgggtgaggtggctcatgcctgtaatccctgcactttgggaggctgaggcgggtggatcatctgaggtcaggagttcaagaccagcctggctaacatgatgaaacccccgtctctactaaaaatacaaaaaattagccaggcgtggtggagggcacatctaatcccagctacttggatgctgaagcaggagaatcacttgaagctgagaggcagaggttgcagtgagcttagagtgtatcactgcactccagcctgggtgacaagagtgaaactcttttgcaaaaaaaaaaaaaaaaaaaaaagaaaagaaaagagaagaaataattcctagatttgggctgctaagaaattacacagagataatggcttatttttcacagtgacaaatacacaaaacatatcttgatacctagaaatttagtactgccttcactcagcgtgaaggccacagtcttcagtgaacgtaaaaagagctaatcaaactgaaaagaggactcttgctatgctatgccaagaaatatcaaagacctggctgtctttactatctgtagccttattacagattccagtggcctctaagggaaatctgcagctcagctcttttgaaataatgtatgcaaggccttttttagctacacgccttctttactgtgcctaatagacacggatactttcaagttacagaattatgtgacaagtgcaaaacacactctgaatatggaaatcaaagactcctttccccaactaaggaagctaatcttgttataacccagccaggaaatttggtcctattaaaaacttggaaaaaaggatccccagcaggtcaactttccccaaagtggaagggaccctatcaagttctctttagtaccccaactgcagttaaaattctgggaataaatagctgggtccacttaactcgaattaaacctgtctcttatgaagtcctacaggacggcagaacagaagaaactgatcctgtttattcccatgagccagtgacctttgactcctgttcagaagaaatgaaagggatgggtaacataaagatatagattggctttctacttttgggaattagttgaaatcatgcagagagtaacttatttactgagtgggcacagacttcatcctgtctacataatcgaacaaactgttgtgtatgtagacatttaaacagagactcaaaaggaaacctatgctttgatcaaaaccaaatgttttgtgtgtgctccagactatttacataacataacccagggcataaaagttttatgcactcacatctctgccatttatgtgctatcagtgaaccatatatcagtttggttctaacaactgcccacttcttgaaaggctttcctgtttagtttacgtggaataattttactaattttgctttgctgttgtggaatatattgtggttgtactctttgtgtaggaatgcaagacaagctcactaaatgctttcttaaattggacgcttattaatcttctagacatcaccttcttttggaactagaagttatgaacgaccttcaccataccaacactgtctgactgaatttctctctaccctgaatgcaagagaccaatggttaggcaggaatattatcgcccctaatcagcctgaaaaagttacagaagacgaatctttgtctctctgcaactcttaggattaagggtcctcttgtaaaggaaggcgaaaaatatgtcagaatcatttgaaccagagcgactccgttttgagagagagctaggaaaatgacgctgagactcgctgggctgcattctcagtaagttaggcattcctagcctctagatatttatggttaaggaaatgaattaataatgtttactaagcagaaccagacggaggagtgtccagatattccaacatctggggaataaaggtattcctaattttgctttaaagataatatcgagtcggccaggcatggtggctcacgactgtaatcctagcattttgggaggtcgaggcgggtggatctcctgaggtcagaagttcgaaaccagcctggctaacgtggcgaaaccccatctctactaaaaaaaaccaaaaaacaaaaattagcccggtgtggctgtgtgcacctgtagtcccagctactatggaggctgaggcaggagaatcgcttgatcccggaaggcgaaggttgcagtgagccgagatcgcgccattgcactccagcctggacaacaagagcgaaactttgtctaaaaaaaaaattattcacatatttaatacgttgaaaaaaagacagcaaagaagagagaaaatttttccgtgttctgagatgggcctcgttcagctccgggaggaagccccgcctgaaaaggctgaggcttaggctgtcaatctttcttcattcagcccaacgtctgatgacatcttctgtcactcagggccttagaaagcggggttcttaaacgttatccaatcagagacgctgtcctgggaactgtccaatcaggcacgcagctggagcgaacagggcggcttccgggatttggcggggcctttgtctctatctgcggccggagctccaggtctcgtcctcactactctgtgtcttctgcttttaggggcgcagcctctgtggccctgtgacctgccccctggaagcctagaaatggtgagagtgccgggtgcgacatcccaagagagggaacggggctggctggaaccggtgggaagcggcagtggcgggactcaggcctcctcgctgtcagttttacaatctgcgcccgagttgttgcccagctcggcctcagtcccttcagccttaagatggcggctgcgctgacagccgggctcccgggcgttctgtctcttcactgcgcagtgactgtgccctggcctggagccctctttgggcagctctgcaccagtagccccgcgtctctcccagattgtgcagggaccatgggaggaacgtcagggcagaatcctgactccgggtgcgggctcatgaatgggaagagctttggtccgtggggttttcaggccattttttcctattaaaaatttatgggcctcactgcaaaaacattaaataatttaaagtgtgattcaaaaattttagagcaccttgctgtggtttctaatttgtattccatggaaggaaaggtttttataagtttcatcataaaaccaaattccgtaattggctaggtacggttatgtagattttgttgttattttgttgttgttgttttgttttcattttcttttttttttgaggcagagtctctgttgcccaggctgaagtgcagtttcgtgatctcggctcactgcaacctccacctcccgggttcaagcgatttttctgcctcagcctccctagtagttgggactacaggcgcctgccaccacatttggcaattttttttatttttagcggagacgggggtttcaccgtgttggtcaggcaggtctcgatctcctgacctcaggtgatccacccacctcggccttccaaagttctgggattacaggcgtgagccactgcccccgtcctagttcttaatttttacaatcaaggtggaaatatcatggttatgtaatcagagcttaattggcagtttatagttggttaagcgttaagcctgaattttgtttctgccaatgtagtaatttacaaaaaaatgctcttgagtttagactttttttttagaagtagaaatccagggactagagccacctcaatctaatttcctgccacttaatggttttcacactccacaggggactgattttttccctgaatttttcacaagtgtcccaagcagggcctcaagtctgcccctcatcccttattcctccagcctgactggcttgcagtaaaatactaaatttccagttttgtctgacgttgccaaatgccagtttctcctctctaattgactttatcaactatttgtcctttagtgtacatattgatacctattttaatgaatctttttttttttttaaaagtatttgagacagagccttgctctgttgcagtgcagtggctggagtgcagtggcatgacttaggctcactgcagcctccgcctcctgggctcaaacggttctcatttctgtctcccaagtagctggaattacagatgcctggcaccacgcctggctaatttttgtagttttagtagagacggggtttcactatgttggccaggctggtcttgaacttctggtttcaagtcatcctcctgcctcggcctcccaaagagctgggattacacatgtgagctaccgtgcctggtgaattaattattttttgacaaagcatttgatggcacatttacaatgattttttttctaaatatttcctacgagaataaagcaaagaataatctgacactattgtaaaatatctgtgtttttttcttttattttacctagtcacagatatcttagaatgtttttgggtcaagatttttttttttttggaaacttcatagggtgacgtatcttcagtcacacttcagttttagacaatcaactaattgaatggcctgacttgacacatgagtaaaacatatctgtaccttgaaaggatttgttcatttgctttgacctaaagtttatttatgtatctttttaagacagagtttccctctgtcacccaggctggagtaaagtggtgccatctctgctcactgcaacctccaaatcctgacttcaggtgattgtcatgcttcagtctcccaagtaggtgggattacaggtgtgcaccaccacacccacctagtttttgtattcttagtagaaatggagtttcaccatgctagccaggctggtgtcaaacttctggcctcaagtgactcaccttctttggcctcccaaagtgctgtgattacaggcatgagccactgtgctcagctgacctcagttttttaactgtgtattgcattttattagtagagcttgaaaggtaaggaaatatttacaaaggccataaaaggtgagtttcaaaaattaataatatattttacttgttgaaaacttttactttatctttctcagagtgagtttagaaattttctcaggcatgtgcttttatggctgagtgatttcatacagaagtccatctagcttttagaatggtagctaccaaagaaaaaaagaaaaaaaaaaaaaatctctgttcaatttcagctgtagacaatgaatacatttccccaaaaaatgtggtagataattggtgagttacatatattactgaaaacttcagttccttttttttagcagggtaaaattttgacagtgaatatctttattctgtatccttttttgtttgtttactacctgatttttaatacaaataataaaataatacatttactgtctgaaaggaatacatagttttgcttttcttactgaggtataaaatgtaagcaccttaaaatgttctttcgttatatgaacaccgaggaattttgctgattttttctaacagttttagtttcaaaaatgaaattaataactaacatggaaattaaagcttaagctgcaggagggtgccccttgtaggttgccatgagagtaagcaggaacaaaggaaagtagaggggttttattacctctaagcagcttgtccttcttactgtgtcctgtctccattggctggagttggatggcacaatccagttggctaaacccggttggctaacttgaaaagtgcaggaatgcggttatacctgtggcaaggcaggaagatcagtttcggtggaagtagcccttgtgacgggaggggtaattcacagagtgggtagcaggtgtgggatgtggctccatacataagaactggcgagaaggttgtttaccagggaagggggaacacagagagtaaggaagtctggccttgaaagcaagggaaaaaagggcaaagaaacttaagcaagctaaacttttgaagaataatttcttacagtattcaacatctatgcattacacgattaagaaaaggctcatttaaacaggatggcatttattacccagaaagttctgaaaaaactgtcgggagatacctgcttattagggtgctaaaaaaaggccacttaaaatcactattaaaaattgtagaacatggaagatatctgtatcttggactttccataaaaatgatgttttcttagggctaaattcagactgtaatttgctttagtgggggtaatacctcagtagtgatgctgtgtcctgcgtgcatcagcacactataaagacttgtcctagtgcagttgatgttaattccataagctctcttacagaatttttctttatggagttatttttctcttcatcattaagtatcttcatgcagctgatgtgcataaaccatcacacttaaatggcagctgcctgttttttttaggtattctttgcatttatcttttgttggtaaatgaaagctctcatctttgtttacaggccagaaaaactgaaaaaaaaaacacgactcttccacttactggatgtttgacaaaatagtcttttggggccaaaacatttgcattactaatgagcttgatagagattcagtaactcagactttatttcagatcttctgaaaaaatactctgcattaacgagatgtccagtttattgtacacatttaaatttgagtggtaccttctaactcaacatgtttattttgtctgaaaaatataaacagctgtctttttcatctgaaaaatatacacaactcattcagtattatgtaaatactgtactcaaaaatgtacatgttagtacatttttacactttatcattcagaaaagtatcatatatacactgatgttctggatattatgccagtctcttttctcagagttagagaatacattagaaaatgtttgtgttttgacaattattttattggataatttcagtccctcttataagttagaatcaattctattcactttctgattttaccttgagtcaaatgaaaaattctgcccatagccactttgtaaatatgtgtgtttgtgtgtattttccagggactgttgacatttagggatgtggccatagaattctctctggaggagtggcagtgcctggacactgcacagaagaatttatataggaatgtgatgttagagaactacagaaacctggccttcctgggtgaggataactttaatacaaaatttttaatataaactaaagcttttatttttcttttgtagtatgttttctggtaatttatgctttcctatttctgttttcaagaaaatcctggggatttgtctgtttagaaaaaatttcttcaagatgtttcatcctgacctgaaatttccacattcctgagctgatctgtgtctttcgctttagattagtggtaatttcagaaccttagtggcataaaatattgttattcacaccttaaaatccaagtgccattaccaatttttgcttcagtagtaccaggcagtgaaattaagaacctacaaaattaaaatattctgtaaatatttaaaaatttctgttataaattagtatatgggataaatttattagaatattctattatatcccttttactttgcacattactaagttggtaattggagaatatgagcaagattcatgttaattatttttaataaaacaggtattgctgtctctaagccagacctcatcatctgtctggagaaagaaaaagagccctggaatatgaagcgagatgagatggtggatgaacccccaggtaggtgagagtgaatacaacagatgacctggatgagaggtccaacgtcaagaagaaagccagtctttaaagtgatttggaaagctgcattccaaaggaaaccgtttctggaaagcctgaaatttaaaaaaaaatatactctcagataggggcatcttctgcttatgcttataaaatctctaagaattctactctcccttcaatgatcttccttaacgtttacagtgacagccaaagtactgttcatggcatataaaagagtgtacaatctgactttttttttcttgtttttgtggacagatagatatctgcatagttttgagacactctatgttaaaatttttttttgttttagaaggagtttcgcttttgtggcccatgctggagtgcaatggtgcgatctcggctcactgcaacctctgcctcccaggttgaagtgattgtcctgcctcaggctcctgagtagctggggttacaggtgcacaccaccacaactggctaattttttgtatttctcgtagagacggagtttcatcatgttggccaggctggtctcctgacctcaggtgatccacccacctcagactcccaaagtgctgggattacaggtgtgagccaccgtgcctggcctctctttttgcacaagagtagtggtttctgtttcattaggggtttttttttgtttgtttgtttttctgctcatttcatcctgttttttttcttgctttcttttttttttttgtttatttaatatggccgtttttacttcctgcagaaagggtatactcgccagcagttttgccatgagagtacactgagcaaaggagacagggtcatttataacctgatgtgtccactctactgctgtgtccagtttccactggctggaacgggcatcctgttttcattactatagccttgaaatatagtttgggccatgcgtggtggctcacgcctgtaatcccagcattttgggaggccaaggtgggtgaatcacgaggtcacgaatttgagaccagcctggccaacatggtgaaaccccatctatactaaaaataaaaaaattagctgggctcagtggtgggcacctgtaatcccagctactcaggtggctgaggcaggagaattgcttgaacccaggagccagaggttgcaatgagctgagatcatgccactgtactttagcctgggcggcagagcaagactctctctcgatgtatatatatatagtttgaaattataaagtataatgtccttctgctttgttctttttcctcaagattgctttggctattcaaaatttattgtggtttcgtgtacattttaggattgtaattttcattactgtgaaaaactggaattttgacagggagtttattgagtctagagatcaccttagataatatggcagtttcacaatacttattctttcaatagaaataaaatatttttaaatttatttgtgtcctctctaatttttttattgctatatctttcacttaaaagatttatgagctgcttggttaaatttgttctaaaattgattattttattgctattgtaaataatgttttttcctctattttatcagagagatggttttaagtgtatggaatgataacttataattgtatgttaatttcatattttgctaatcaactgagtgtattaattagtttaaagaggttttaatgtacttttttatatgtaagatgacataatctacaaacagtgacgttttacttattggtcttcaatttcaatgactttaaatttttgttttgactacttcttaattcacatactttcagtgctatgttaaaatagaagcattgacaataagagacaatagtattgcgttggtgtctgtaaatttgaaggagcaaacacctcttcagaattttataaactggtttcagaaactaaaaatctattttcgttgtacccccagggtgatagaatatcctctgggtttgtagtgaagaggggttgtagcttggtcttaagtctgctgggtttgcacaagggtccacttttagttgtcttgttaaacagggcttggatatttgtaattctcatttaaattttagacagagtgagtatccttcaggactttgctctgaagggcagacccaagggcaggtttctgcagtcaggtctgtatatggtgttctttatatcaggatgtggatgagcatggctttcacccagtacaagagaggattttcccaggtcactttggatttctacataggcagaactggccatgaactgtggctcagggagctggaactgagtcatggaactgcttcagggaccacaggaaaggccaaggtctgaggcctgccatcatggctataaatggaggtcttcctccaggcctctggaagggcaggacccacgctgcccattggctcccaagactgtggctgtgaagagtttgggatggttacagagtaagtttaaaattctcagtggaaccaagttaggtggagcactttcttgtctgtagccaaaaacagtggtcatgtagtttgcaacctgaacggaggcctgccttctaaacagaattaccttgaatcttgggctttagcagaatttcacaactcctttcctggatctcagagctctcttaaaggcatttatttttgagatgaggtcttgctacataatccaggcaagtcttaatattttgacctcaagcagttcttcaactgtaatgtaccatgtagttttcattacaggtgtgaaccatgatgcctggttctctcataaaagcatttttgtcaggaatggatgacaaattttcttgctgtcaggggataagcaaataggtcacctttttttttttttatcttattaatgccactctccatataaatttttactttctattttctacttcaaatttgtctgtaattttagattcagacatttaggacaatatactagaatttacatgttgttcctgaattaaattagataatacgcaggcaggcaaaaaggaattacagaattttcaaccacttttgtcagcctataactaaataacataatttattccccaaatatttgtttcacatatgaggctctaaccatattctgctaaatatatatataattaagcaatgtaaggctattctttgcttctaaacttggattacagtagttttattttgtgtaaaaatagcatatatttaaaacataaaaattggcatgaatttcttttaaatgcttatctattaaaagtttctcattagcatctcctatttatgattgtactgcattttctctgaaattttattgccatacaatagatgccagtaattttttttttttttttttttgagatggagtctcgctctgtcacccaggctggagtgcagtggcgtgatcttggctcactgcaacctccgcctcccaggttcaagccattctcctgcctcagcctcctgagtagctgggactataggtgccgacaccgcgcttggctaattttttgtatttttagtagaaacggggtttcaccgtgctctcgatctcctgatctcgtgatctgcccgcctcggcctcccaaagtgctgggattacagatgccagtaatttaaaatgcctgccttccatgaatgcacagttacagtcaaacattgcagttatctagacaaattatttgttaatgtacataaatgttgccaactagttgtaatgagtaaacatttctgttattgtgttgcagttttatattagtgttttttgtagtgtaagtttcctaacatcagtttattgtgcctattggttttttcttatatattatgttttgtatactttaagttaatgtggagtttaattaaaagataaatgagccatgtctatcacagtcaaattatatatatgtgtgtgtgtttatatctataaatatgaccccaattttggttataccttgtatatattctttcttagctcttttttttttttctttgagaggaagttttactcttgttgccgaggctgaagtgtaatgcacgatcttgactcactgcaacctctgtctcccgggttcaagtaattctcctgcctcagcctcctgagtagctgggattacaggcacatgccaccacacctggctaattttgtattttttttttttttttagtagaaatggtatttctccatgttggtcaggctggtctcaaactcctgacctcagttgaaatgcccaccttggcctctgaaagtgctgggattacaggcgtgagccgccttgcctggcctcttagctcattttcaatgttggttttatcttgtctaagttagtagccttggaaatagtcttattttcaccatgtgtttaatgatgaatatatatttcctttgtgtgagataattcttttgtgatttgaaggtaatttttaaaaaagattcataatcctgtattgtctccagttttttaaaaaataattgttttaaaaaaacataacatataatttaccttcttaaatccatttaaatgtacatgtcagggcgaggcaatgtggtggatcccttctgtaaaaccaggattttgagaggccgggacaggaggtttgcttgagcccaaaagattgagaccaacctgggtaaaatatggagacaccctctctacagatatttttttctaagaaatagcaaggcatggtggtgtgcacctgtggtcccagctacttgagagtttgagggtcaggattacttgacgctgggagtgtgaggctgcagtgagccataattgtcccattgtactcaaacttgggtgacagattgagaccttgtcttaaaaaaaaaaaagtgtatatttcaggcatatcatgtatattcacattgttatgcaaaagacttctagaaattttacatcttgtaaaactaaaactcaatatccattaaataacatttacccattttatgctctctttagcccttgagaagcacttttccactttctgtttttacaagtgtaattgtcttatatatctaagtgaaatcgtaacatccatcatttctttactggtttatttcagttggcataatattctcaaagtgtatcttcaaatgtgacgatttttttcaaggctgaataatattccattgtatcaaatatgtcttcaggttcctatgttatgtattttagatatagattcataaatggaatcactttatttaataatttatattatttgaagtacatttataacattataaaataattggtacatctttattttccaccgacaatcaacccaactaacttttgtatttttagtagagacgggatttcaccatgttggtcaggctggtctcaaactcctgacgtcaggattcacccacctctgcctcccaaagtgctgggattacaggcttgagccaccacgcccggccaagggttttatttttattgcatcatcaacagatttggtgttttcaaaaaattgatagtggccatttaaatgagtgtgaggggattttgttttttattatgacttttatgcatttctctacaaattagttttgagtgtcctttcaaatttttgaagaaaatttatttcaatttgtctatttctaaataaagttattcaatttgattgttcagtttttcttttctttttttttttttttttttgggagatgaagtcttgctctgtcacccaggctgaagtgcaatggtgagatctcggctccctgcaacctccgcctcctgggttcaagcgattctcccacctcagccttgtgagtagctgaaataacaggcgtgtgccaccatgcctggctcatttttgtatttttagtagagacagagtttcaccatgttggtcaggatggtctggaacacctgtcctcgtgatccgcctgcctctgcctttcagtgtgctgcaattacaggtgtgagccaccacgcccggctattgtttggttttaaaagtttatagtttttgaatattgactcccatcacatgtaatttgtaaatattttcacccattttctagaatgcattatccatcttttaaatatttatatgtgcagaaatgttgaagtgtagtgtagttaaattttttgtttttttctttggtgctcatgcatttaattttatatctaagaaaatggccccaagactgatgtcgtgttttccctatatattttaaagagattaagaagttatccggtcgggtgcggtggctcatgcctgtaatcccagcgctttgagaggctgaggtgggcggatcataaggacaggagttcaagacaagcctggccaacgtggtgaaaccccgtctctactaaaaatacaaaaaaattagctgagcgtgatggcgtgcatgttaatcccagcaactcaggaggttgaggtgggagaatcacttgaacccaggaggcggaggttgtagtgagccgagaccatgccactgcactccacctgggctgcactccagcctgggcaacagagcaagactctgttccaaaaaaaaaaaaaaaaaaaagttatcttcctatgtctaatgaaaagatttttcacatatggtatagagaaataatcgaacttcattttatcgttatggatgttcagctttcaacataattttttgaaaagattatcttttttctactgtgtgctcatgttaattttgtgggagattatttggccttacacagaagggttcatttctgggctctctattctgttctttcatctctttatctgtctttgtgtcagtaccaaattgtttttgttattgttgattttaatgtgtttcaaaatcagaaaatataatgtctctgttgtttttcatgggtgtttgtctatagttcataataaaattttaacattttaaacaatgtttccttaaaaaacccctatttggatttatataaaaattattattttttgagatggagtcttgctctgtcgcccaggctggagtgcagtggcactatctcggctcactgcaacctctgcctcccaggttcaagcaattctcctgtctcaacttccagagtagctgggattacatgcccagctaaatttttttgtatttttagtagagacggggtttcactgtgttgcccaggctggtttagaattcctgagttcaggcaatccacccgcctcagcctcccaaagtgctaggattacaggtgtgagtcacctcacccggccataaaaattatattaaatatgtctaccactgtaggttgtattgacattttgaaaaattaatgtttttttattcctgagcaaaaatatgttgaaaagtgtgttttatttttatatatttttatattgttcagttttacttttaatttctagtttaattcagttttggtcagacaacacaaagtgtgtaattttggtcttcttaaatttatttgttattgttgtgtttgttgtggtttttgtttgtatacaggatcttactctgtcacccaggctggagtgtactggcatgattttggctcactgcagcctcaacctactgggctcaagtgatctttccacctcagtgtctccagtagttgggactacaaacataacgtaccatgtctgaataattctttgattatttgtagggatagagttgcccaggctggcctcaaacttttaactccaagtgatcctcccaccttggtctctctaagtgttgggattataggcatgagctacaccacccagctggcattcttaaatttgataaaacttagtatgtgtcctaacagaatacaccagctgcaaataagaatattgtgtattttcttgcttttgactggaaagttctgtactcatctgttaaacctagttggtctataatatggttttgatgttcatgtcctccaaaccttatgattaaatgcaatttttaatgttggatgtgagacctggtgggaggtgtttgggtcatgggggcaaagtcctcatagatagcttggcaccatcctctcagtaatgaaaatgtttatactccattaattcaaatgaaagcaggtttattagaagaacctggctccttcgcctcatacttgctctgtctctcatcatgtaatatgtgcagttactcttcgccttcaatcatgactgtaagcttggtgacactctcaccagaagcagatgctggcacactttctacagtctgctaaattgtgagccaaataaatattatttctttataagttatccactctccagtattcacctatatgcaaaataattgatacagtctataatgttgtctaggttttctgttttcttattttttgtttaatgtgaattttctattacggaaaatggggtcttgatgtctacaattattatgttgctatgtatttcttgctttacttttgtcaatatttactttatatattttggagccctgatattgtacatacacatacagatagatagagagatagatagatagatagatatagtagttatacatttgtggtaatatcaacccattttaccaatatatactaccaatgtttgtctcacgttagcacttgacttaaaatatattatgtctaaaacccaagtgtagttactattttcataaaatacaggtttttgcactatgtaattttcagcctatttgactcagtgctaaaatgagtcccttgtaggtggcatatggtttgctttttcttaagccactaaagcattttattttttctttttataatttcatttatttacttgtttattcatttatttttgagataggtctcactctgtcaaccaggctggtttgcagtgttgtgatcatggctcacagcagcctcagtttctcaaactcagaagattctctcatttcagcctctcaggtagctgggttacaagtgtgtagcatcacacctagctagttttttttgtatttatggttgagacagttttgccgcgttgccaaggctggtctcaaacttctgagatccagtgatcagcccatcttaacctctcaaagtcctgagattatatttttttctattaagtagtttaatttatatttaaaattatttattaaaaatgaagttactacttttattgtgattgttttatgtgttcctcagtggtattttttatatgttggtttattgccttaaatttcattttaattgtgtagtgatgtgcttcaattattttttatatcttgttttgcatagtttctataaatattatcttcataatcatcttgtgtattcgtctgtttttatgctgctaatgaagacatacctgagactgggcaatttagaaaagaaagaggtttattggacttacagttgtgtgtgactggggagacctcacaatcatggtggaaggtgaaaggcatgtctcacatggtggcagacaagagagggagcttgtgcaggaaaactctgccttataaagccttcagatttcatgagacttattcactatcatgagaccagcacagaaaagacctgcccccatgattcaattaccttccaccacgtccctcccacaacatgtgggaattaaagatgagtcttgggttgggacatgggcaaaccatatcatcttaaaaaatggagtttacatgaaacatcttaaaattaaaacaatatatttatatctcatgacaacttcaattgaatataaagattatacctctatatttttcagtttattaatgttaaaattattttatattgtgtattaacatatttatgcaggtttttattctgttttaaatattctacagaatagctttaagagttatatgcatcatcattataatagtaaaaatttctatatttgtatatttacatttaatagagagctttattttatatatggttttatgatgctgtccagtagtatttttaaacaaaatggacttattatagcagttcttactatatgtagagtctcactgtattactcaggctgacctgaaactcctggcctctagtgttctgatagccttggcctcctaaaactgtaaaattagaggcatgagccacggtgcctggccaccatgtaccattttttttggtagaactgtgctactggtgatgaacacccttaccttttattttggattttttaattttcatctttttaaagagaaatacatttaaatcaaatattattggttagaaatattttttccttttattacatcaaaatttgggaatttttatcttcaagtaatctctatgttatttttttcccatattcttcctctgagattttcttaatgaatatattgatctagttgatggtatccaatcacttttacattccatgttttaattttgttttggaagtttatatttttatgttatatattttagggtatgctaccacacatccattaattgtgttttgattttttagtatatattataattgtgcatgccaatattttaactttatataatttaagacattgtggagcaaaatcatatatgaattagccatatgtctttttctgatagaattatctgtatgtttgtttgcctgtataaatgttatccttgtatttttttaataacgtgtatatttgttgtgtaagtttgttgtgaatggttttctaatcctgtgtagatgtgaagtcataaaattattgtaatttcaacatcctatttatttgtgagtctatgtaatttttgtgtggtagaaacatttttggatttgaatataatttaaaacaatcataattatttatctcttttaggtattattgtttatttttgcttgtctaaaaaacacgacaaaatttaccacaaaatatttttaaatattcagtttagtcatattgtcttgacattgtaatgcaacatattgctaaaatgtttctatcttgcaaagctaaatcttaatacgtattaaacagctaccaatttttccttctttttttcttttttgagatggagtcttattctgtcaccctcactggagtgcagtggcgtgatctcagctcactgcaacctccaccttccaggttcaagcaattttagtgcttcagccttctgagtagctggggctgcaggcacctgccaccatgcccagctaactttttgtattgttttagtagagatggggtttcaccctgttagccaggatggtcttgatctcctgacctcatgatccacctgcctcagcctcccgaagtgccgggattacaggcatgagccaccgctccccagccaaaaccgcaactgagcttctttatttttacatcattttttctaacttttaggatctgtcagtttccttttgtattttttacctccacagtttccgtttttatgaaatgttaaatatttttgttctcgtcctcatttttgtgattttccatacttgtctctgttcctgttttaatcagtattattcaatttattaccaattcttaaaattaatgtataaatcttatttttttatggtttctttcagaaaattttatgatatttttggtgggatgatactgctatattttgtatatattataagctttcagttttttacattagaaaaatctacctgtcaaaatttttataatgtggctttgtcctggcatagtctgaaaacaattgtcttggctcatcattatggcagtttttcaaacatattcttaggacctgtattgtctgaaattttgtgttcagtttttagttaagagagtttattcatattactttgtaggagtcagtaatcacttgctacacctgttccttttctgtggtactgcagtctggcggctgctggaacatttctctttggtctcagtggactcaaactctcattccgaagtataccaccatttctgtcagcactttatgtcatgagagacagaaaacagtgtccaaaaaaagcccctaaaagccagaaatgataatgaatgtgccagtattttacctttcttttaaaacagaaatgaagagtttgcaatttacttctaaaggcactatgttatagtgggaagcaggaaaagctgtgttgggtaaatttagacttttctttttcttctatgtggttttttgcattgtgctcttctggaacactgcacacagtgaatgttcacatctgtgaacatttcccacagatgtattttggtttgtaagtttttgttacatttaaatgtctatgaaagaattagggtctgtggtattttgcaaaaccatcttgtttttgtaggttgtataattttataggtaagatttttaaactatatttatgtcagtatagtaagtggagtaaattattttaatttttttttaggtatatgtcctcattttgctcaagacatttggccagagcagggcgtggaagattcttttcaaaaagtaatactaagaagatttgaaaaatgtggacatgagaatttacagttaagaaaaggttgtaaaagtgtggatgagtgtaaggtacacaaagaaggttataatggacttaaccagtgtttcacaactacccagggcaaagcttctcaatgtggtaaatatttgaaagtcttttataaatttataaatttaaacagatataagataagacatactagaaagaaacctttcaaatgtaaaaattgtgtcaaatcattttgcatgttttcacacaaaacccagcataaaagcatatatactacagagaagtcctacaaatgtaaagaatgtggaaaaacctttaattggtcctcaacccttactaatcataagaaaactcatactgaagaaaagccctacaaatgtgaagaatatggcaaagcttttaatcaatcctcaaattatactacacataaggtaactcatactggagagaagccttacaagtgtgaagaatgtggcaaagcatttagccaatcctcaacactaaccatacataagaggatacatactggagagaaaccctgcaaatgtgaagaatgtggcaaagcatttagccaaccctcagcactaaccatacataagaggatgcacattggagagaaaccctacaaatgtgaagaatgtggcaaagcatttgtttggtcctcaaccctaactagacataagaggctgcacagtggagagaaaccctacaaatgtgaagaatgtgccaaagcttttagccaattcggacaccttactacacataggataattcatactggagagaaaccctacaaatgtgaagaatgtggcaaagcatttatatggccctcaaccctaactaaacataagaggattcacactggagagaaaccctacaaatgtgaagaatgtggcaaagcttttcatcgatcctcaaatcttactaaacataagataattcatactggagagaaaccttacaagtgtgaagaatgcggcaaagcgtttatatggtcctcaaaccttactgaacataagaaaattcatactagagagaaaccctacaaatgtgaagaatgtagtaaagcatttagccgatcctcagccctaactacacataagaggatgcacactggagagaaaccctacaaatgtgaagaatgtggcaaagcttttagccagtcctcaacccttactgcacataagataattcatactggagagaaaccctacaaatgtgaagaatgtggcaaagcatttatattgtcctcgaccctatctaaacataagaggattcacactggagagaaaccctacaaatgtgaagaatgtggcaaaacttttaatcaatcctcaaatcttagtacacataagataattcatactggagagaaaccttacaagtgtgaagaatgtggaaaagcgtttaatcgatcctcaaatcttagtacgcataagataattcatactggagagaaaccttacaagtgtgacgaatgtggcaaatcatttatctggtcctcaaccctttttaagcataagaggattcatacttgagagaaaccttaaaaagggtaaagaatgtggcaaagcatttatatggtcctcaacgctaaacataagaggatgcacactggagagaaaccctacaaatgtgaagaatgtgaaaaagcttttaatcctcaaatcttactaaacattagataattcacactggagagaaaccttacaagtgtgaagaatgtgggaaagcttttaatcattctcaaatcttactacacataagataattcatactggaaataaaccctacaaatgtgaaaaatgtggcaaagcatatggtccacacccctaagtagacataagaggatgcacactggagagaaaccttacaaatgtgaggaatgtggcaaagcctttaaatgttcctcaactgttactgaacataaagtaattcatactgaagagaaaccctacaaatgtgaaaaatgtgtcaaagcctttaagcagtcttcaatcctgagtaaccataagataattcaaactggaaagaaaccctgcaagtctgaagaatgtgggaaatctttcttttttttccattgcacctttattgtttattctgttcactgttcagaattttcatacagtctttctagaatcaagaagggtgtacagtggtattcctgtggctttctctcctctccagctcctctcttgttcagcagcctccggacccccaagggctaaggaatcagacacaccgggtttggatcctgactccactaggagccatgtgatctcagggatatttcttgatctctctgagctctttttcctttttctgcaatgtggggaaaaggctccctctctcacagagttactaccagaattcaatgactccaagtatccaaagcatctggcacagtgcctgggcacacagtatgcccagatgcaccttagcttccttccttctggcagggaaaagatacctgataaagccagagccagctgcttaggggcatttgctttataaagagcctggtccctttaacagaggccaagaaatgactctctaatggtggaatttcagacaccatagcatgggtgagggagagatctggaggcatagactatagaagtctcagaatcatttgaatccagccaggcagactgctgctgcttctgcccaggggcaaggctggtgatacagtttggctgtaaccccacgcaaatctcgtcttgaatccccacatgttgtggggagagacccagtgggaggtaactgaatcacaggggcaggtttcccatggaatgtgggaaatcttttaacctgtcttcaacttttattaaacataaggtaattcatactggagtaaaactctacaaatgtgaagaatgtggcaaagtgtttttctggtcctcagccctaactagacataagaaaattcatgctggacagcaaccctacaaatgggaaaaaattggcaaagcctttaaccagtcctcacatcttactacagataagataactcatattggagagaaatcttacaagtgtgaataatatggaaagcctaaaaaagtcctcaattcttaacagatataagattattcatactgaagagaaactctacaaatctgaaagatgtgcccagtgcctttgacagcatctcaaacttttctaaacaaaatcatgctgctgacaaatcctagaaatgtgaagaatgtgacaaagcctttaaatgattgttgcacttcattgtatgtaagatcatttatactggaaaaaactaccaatgtgaacaatgtggccaagcttctaaccaatgctcatagcttattgcaccggtaagcatttatatttgagaacaaatgtacaaatatagacaaagcaaaaaagccattaatacctgctcacatcttactcaaaatcagagttcatactgaataaaagcattaaaaatctaattaccgtcaaaagatcagaaaatatgtctttaaagtgcagaagcatatttattttgaaaaagcattacaaatatgaagagggttgtaatacatttacttgtctcacagatcttattgtacacattttgtactagaggaaaaccctgaggcagttattaaaattttgttcaacatcagggagtttatattgaagaaaaccctgcaaatgtaatgaatttggaaaaacattttttcaaaaactacaaattatgaaacaccaaagcgttcatactaaaatatatttttgcagatgcattaaatatgaaagatgttcaatccaaaattaagtctatgtaaatatcagggaataattcacagtagaaatatttagggcactcaaactttagacattacactaaatcagtgctgagtataggaaataatacaaactaaagttcgtgtaaacattatttgtatataactttaaaagaagaatattttttggagagttataattacaatcaaagtataacttttttttgaaaatacagaattttaaaaaagcaaataatggagttaaactcttaaattacttcatgctgttccatcattcctggtgtattcacatgtgaaaacatgtgactaattgtagctgcattaaagatatgagagattcttttttattaggtaggcctttatgactttttctatggaaaggtaaggacattaaaatgtaagatacatgatgaaaatttaagtagagaggctctttgggttaacttgtaatgttgagtgatgcatgaggtaggtgttcagagtaatatttttatgcattatcatgaaagaaaaactttttttttttcatggcagtttgatttttatttttattttaatttattttttatttatttattttttaaggtcacagatcaacaggatcccaaggcagaagaatttttcttagtacagaacaaaatgaaaagtctcccatgtctacctctttctacacagacacggcaaccatccgatttctcaatcttttccccacctgtcccccctttctattccacaaaaccgccattgtcatcatggcccgttctcaatgagctgttgggtacacctcccagacggggtggtggccgggcagaggggctcctcacttcccagtaggggcggctgggcagaggcgcccctcacctcccgaacggggcggctggccgggcggggggctgaccccccccacctccctcccggccggggcggctggccgggcgggggggctgacccccccacctccctcccagacagggtggctggccgggtgggtggctgacccctccacctccctcccggacggggcggctggccgggcagggggctgacccccacctccctcccagccggggcggctggccgggcggggggctgacccccccacctcccttccggacgaggtggctagcgggcggagaccctcctcacttcccagatggggtggctgctgggcggaggggctcctcacttctcagacggggtggctgccgggcagaggggctcctcacttctcagacggggcggttgccaggcagaggggctcctcacttctcagacggggcggccgggcagagacgctcctcacatcccggacagggtggcagggcagaggtgctccccacatctcagacgatgggcagccgggcagagacgctcctcacttcccagatgggatggcggccgggaagaggcgctcctcacttcctagatgggatggcggccgggcagagatgctcctcactttccagactgggcagccaggcagaggggctcctcacatcccagacgatgggcggccaggtagagacgctcctcacttcccagatggggtggtggccgggcagaggctgcaatctcggcactttgggaggccaaggcaggctgctgggaggtggaggttgtagcaagccgagatcacgccactgcactccagcctgggcaccattgagcacttgaaaaacattctttagttaacattaagttagtagtatgttactgtacttttatggaataatatacagtatatttttaaattatgtgtgaacttaacttttcaattcagcatttttaacatgttaaatactatcatgaattcattgaagcattatgccactaactttaacctattccaccttactcaatggtgtaggtaaaagatggtaacaatacactatttggtaagataatggactgacatctctagtaatctttttgtcagtggctttaaattgccaataagttaaagaatgttgttcctataggttaaattttattcttatttttacatttaaatttatttttcttaatttttgtggatatgtaatatgtgtatatgcttatgccatatatggcatattttgatacaggcatgtgatatataatcttagatgtaaataaattatggagtgtgtttgtgttagtgtaagtttgaaactatttttagccaaaaaaaagtaatattggaacaaaataaatcattttaagaaggtgtctaatttactagaaaaaaaccaaaattctcaaaattactgaaagtaaatctatcctctgtactttgtattaaatttattactgtataaccttttggcttatgcttcagaatctccccatgcaaattctctgttttaacttgactgttactcatgttagaaccataattttgtttgttcgtttaatagtttttttttcttttttttttccttttttttttttttgagctggagtcttgctctgttgcccagactggagtgcaatggtgtgatgttggctcattgcaatctctgcctttcaggttcaagcagttcccctgcctcagcctcccaagtagctgggattacaggttcccgccaccagcccagctaatttttgtatttttagtagagacaggattttgctatgttggtcaggctggtcttaaacttctgacctaaggtgatccacccacatcagcctcccaaaatactgggattacaggtgtgagccaccgtgcctggcctgtgtgtaatagtttatgaaatattcattatgtgagctggtctgtaagtataagaatgattttttttttaatttcattgttccatttattggggtacaggtggtgtttggttagatgagttaagttctttagtggtgatttgtgagaccctgatggacccatcacctgagcagtatatactgcaccatatatgttgtcttttatccctcccccttcccactcttcccccccaagtctccaaagtctattttatcattcttatacctttgcattctcatatcttacctcccacatatcagcaagaacatatgatgtttggttttccattcctcagttacttcacttagaataatagtctccaatatcatccaggtcattgcaaatgctgttaatttctttttgtggtgagtagtattccaacatatatgtatatgtcatagtttctttatctgtttgttgattgatgggcattttggttggttccacgagttcaaaattgtgaattgtgctgctggaaatatggatgttcaagtttctttttcaaataatcagtatttgggtttatttctgggttctctgttccattggtctatatttcaaataatgacttcttttcctgtgggtagatacccagtggtgagattgctggatcaaatggtagttctacttttagttcattaaggaatctccccacttttttccatagcggctgtactagtttagatttccactagaagtgtagaagtgttccctgatcactgcatccacgccaacatctacagtttttcgatattttgattatggccattcttgcaggaataaggtggtatggcattgtggttttgatttgcatttcccttatcattagtgatgttgaactttttaaatgtttgttagccatttgtatatcttttgagaattgtctattcatgtctttggcccactttttgatgggattttttttttttttttttttctgactgattcgtttgagttcactgtagattctggatattagtcctttggcagatgtatagattgtgaagattttctcccactctgtgagttctctgtttactccgctgactgtttcatttgccatgcaaaacctctttagtttaattaggtcccagctatttatctttgtttttactgcgtttgcttttggtcatgaaatttttgcctagccaatgcctagaagggtttttccaaggttatcatgcaaaatttttatagtttcaggtcttaggtttaagtccttatttcatcttgagttgattttcatataaggtgagaaatgaggatccagtttcattctcctacatgtggctagccaattatcccagcaccatttgttgaaaagggtgtcctttcccacattatgtttttgtttgctttgttgaagatcagttggctgtatttgggtttatttctgggttcactcttcttttggtctatgtgcctatttttataccagtaccatgctgttttggtgactagagccttatagtttgaaatcaggtagtgtggtgcctcgagatttgttctttttgcttagtcttgctttggctatgtgggctctatatgaatgttagaatcgttttttttaactgtgtgaagaatgatggtggtattttgaaggggattctgtggaatttgtagattgctttaggcagtatggtcatttccacaaatttaattctatccttccatgagcatgggatgtgtttctatttgtttgtgtcatctatgatatctttcagcagtgttttgtagttttccttgtagagttcttttgactccttcattagatatgttcctaagtattttatttttattcagctattgtaaaaggggttgagttcctgattatttctccatttggttgctgttggtaaataaaagaactactgatttgtatacgttaatcttgtatccagaaactgctgaattcttttatcagttctaggagctttctggaggagtcctcagggttttcaaggtaaattatcatatcatcagcaaacaggtacagtttgacttcctgtttactgatttggatgccctttatttcttgtcttattgctctaggtaggactccagaactatgttgaagtggagtgttgagaatgggcatcctttcttttttctgttctcagagggaatgctttcaacttttccccattctctattatgttggctgcgggtttgtcatagatagcttttattacatgaagttgtgacccctgtatgccaactttgctgagagttttaatcataaagtgatgctggattttgtcaaatggtttttctgcatctattgaaataatcatttgatttttgttttgaattctatttatgtggtgtatcacatttgttgacgtgtgtgtgttaaaccatccctgcatccctggtatgcaacccacttgattatggtggattatctttttgacatgttgttggatttggttagctagtattttgttaagaattttagcatcaatgtttgtcaaggatattaatctgtagttttcttttctggttttgtcttttctggttttggttgtagggtgatgctggcttcacagaatgaattagggagggttccttctttccctatcttgtggaacaatgtcaaaagtattggtaccaattctttgaatatctggtagaattctgtgaatcagtctggtcctggactttttttcttggtgatttttaaattaccattttaatttcactcttttttattggtctgttcagggtatctaattcttcctgatttaagctaggagggttgtatttttccaggaatttatccatctcttctagattttctagtttatgtgtgtaaaggtgttcatagtagccttgaataattttttgcgtttcagtggtgtcagttataatatctcctgtttcatttctcagtgaggttatttggattttctctcttcttttcttggttaatcttgctaatggcctatcaattttatttatcttttctaaggagtagctctttgtttcatttaccttttttattttttcttttaatttcaattagttatgttctgatcatggttatttccttttttctgctgggtttgggtttggtttgttcttgtttctctggttccttgaggtggaccttagattgtctgtgctctttcagactttttgatgtaggcatttagggatatgaactttcctcttaccatcttcgctgtatccaagaggttttgattggttgtgtcattattgtcattcagtttgaagaatttttatgttccatattggttttgtttttgacccagtgctcattcaggagcaggttatttaatttccatgtatttgcatggttttgaaagttcctttgagagttgatttccagttttattccactgtgctctgagagagtgcttgatgtaatttcaattttcttaaatttattgaggctcgttttatggcctatcatatgatctatcttggaaaaagttccattcgctgttgaatagaatttgtgttctgcggttgtaggattaaatgttttgtatatacctgttaagttcatgtgttccggggtatagttaaatccattgtttctttgtttactttctgtcttaatgatctgtctagtgctgtcagtggagtattgaagtccctccctcttatggtattgatgtctatctcatttcttaggtctattaataattgttttataaattttggagctccagtgttaggtgcatatatgtttaggattgtgatgtttccctgttggatcaggccacttacgattatatagtgtccatctttgtctcttttaaccactgtttctttaaaatttgttttgtctgatataagaatagctacccctgttttcttttggtgtccatttgcatgaaatgcctttttccatctctccacttttgagtccttatgttaagtgagtctcctgaagacagcagatagttggtgagttcttgtccattctgcagttctgtgtcttttaattggagcatttaggccatttccattcagtgttagtattgaaatgtgatgtacaattacattcatcatgctctttgttgtctgcatactttggtgtttttttttggggagggaaggtgaggggaatggagtcgtgctctgtctccagggtggagtgcagtggcttgatcttggctcactgcaacctccacctcccaggttcaagcgattctcctgcctcagccttctgagtagctaggactacaaatgtgcaccaccacgcccagctaatttttgtatatttagtagagatggggtttcacccccatgtctagaaattcaatggcaataaatattgttgcccacatattaaaatccaatatccaggaccaattttaaattcaatggtattggatagcagagctacagacccagaaatgtaaaatatgttctaaatattctaaaggttctatcagaaaacagtattttgaaattaaatatgtagaagctttcataatattttctctactgaacatggtactaggttgctaactggagaatcccagcaagtcatattacttttttctaacaaaacaggccttgctgtctctaaccctgatctgatctcctgccttgagcaaataaaagagccctggaatgtgaagagacatgagacagtagtcaaatactcaggtaggtaagcatgaatgaagccgataacacagatgacaggttcaaaggtcaaaaagaatgccagactttaaaatgtgatatgggatgctctgcttcagtggaaagatttcctaaaaagcctttttttttcctctagctctgaagtaggagcatttttgtcccatacccttaaattatttctaaggactctacttcctatttagtgattttcctttgagggtaccatgagaactaaactcctctttatggcttataaggtactgcatgatatacctgctcttccattgcttcgggggaatataaaaatatctcgagtatttttgaggaactgcatgttagattatttctcaaattttcccatcatgtctgaaatgtatgagagcagtggtgatattaagatttgtttcagaaatctcaggaacatcaatgacagaggttacttatttctctattttctgtttttaatattagcaatcctaactcaagtgatagctcattattgttttcatttgcagttgcctgttgttaggtgatattgaccactttttttatatacctattggtcatgtgtatatatttgctggcaaaatattttttgaatcttttgaccatttttctgttgggtttttattgttatacttgcctttgctttgaatttcctgtatattttgaatattaagcttttcttgtatatatggtttgctattgtgagcatgcaataaacattcaagtataggtatcattttcttataataaactatttttctttgagtagatacccaatgatgagacttttaaatcaaatggtagttctatttatagttgagactgagcatttttgtcatatgtgtgttggctatttgcatgtctttattgaaaaatgtttactaatgttatttgcccatttttcaatgggattctttattattatgatatttttgagttgtttgagttacttgtaaattctgaatgttagtttcattttggcacatagtttgcaaatatgttcatttattctgtaggttgcctatttaccctgttgattattttttttgctgtgccaaagctttttagtcccgtttgtctatttttaataataatataataaataataatacaataatagttttctttgttgtgtccttgcctaatgttggtatcagggtgaaactgacctcagagtgacttaggaagaatttcatttttgggaagagtttcaagaggattgttattcaaatacatttggtagaatttggctgtgcatttttctagtcctaagcttttctttgtcaagacatttttaattactgactcaatcatgctactcattattggtttgttcaggtactctatttctttctggctctatcttgggaggttgtatgtttccataaatttatttactctaagttttcaggtttgtgagtgtctagttgtttataatcatttctagtgatcttttgtattactgttgtatccattgtaatgtctattctttcatttctgattttgtttatttagatctctcttctgtttgtgatgaatctagctagcaatttatcaattttgtctttttgaaaaaccaactctttattctgttgataatttttattgttttggtttttatttcatttggttctgttctgatttttgttatgattttcttctaacttggaatttgtttttttattaatattctagttcctcgaagtgtgatgccaggtccttaatatgtaagctttctacttttttgatgcaggcatttaggctataaactgccctcttagtactatatttactgtatctcacagattttattatactgtgtttctatttccatcttttttcccacaaagttttaagtttcatcttaatattatttttgagatgggctttactctgtcacccaggctggaatgtagtggcacagtcttggctcactgcaacctccaccttccaggctcaagcgatctttttatctcagcctcctgagtagctaggaacataggtgcgcaccaccacatctagctatttttttgtatttttggtagagatagtgttttgccatcttgcccaggctagtctcaaactcctgacctcaggtgatccacctgcctcagcctcccaaagtgctgggattacaagtgtgagttaccacccctggccatccatgttaattatttcgtttacacagtgactgttcatgagtatgttgtttaaattctttgtaaatttatagtttctgaaatttttattgctattgatttgtagttttattctgtggtcaaggtagttaatataattttgttttgggggtacttttttgatttgccaactcttctatctcagtggtctctctaatgctgtgagtagaatgttacatttttccactattattgtattactatctgtctctttatataggtttaataatatttctttttaaaatctgggtgttttgatgttgggtgcgtggatatttagaattgttatatcctttcactgaaatgatttctttattattgggtgatgacctttatcctttttgttactgctttttatttgaagtctgttttatttgatgtaagtatagatactccagtttgcttttggtttctgtttgtgttactgtcttccaccttttacttttaatctacatgtgtcttacaagtaaggtgagattcttgtaggcaacatacagttggatcattttttcttattcatttcataaatctatgcatttcaatgaaggatttcattgatttatattcaaggttaatattaatatgtaaggttttgttactctcataatgttaatttttttctttttatctatctttgtggtttaataaagttctgtcatgttgtaatttgatttatttctttttctcttttgttttataagacctgttagttttatacttttatatgttttaatgatggtgaatatcaaactttttttttatattagaaatcccttgaacatcttttgtaggcccagtctagtggtaattagtcagggtaagattttatatctttttcatctgtgaaggttaatctagcttgatgtaaaatatttggctggcacttttctttcaacactctaaatgtgccatctcattctcttctaaccagtaaagtttctgctgagaagtgtgcttttagtctgatggggttttctttattttataattacttctttcactttcactttagatattcatcatgtgccatgatgaagtctgttttgcaatgtattttgctggtgattgctgagcttcctgtatatgtatgtctaattctattggtaaagttgggaagttttcatcaattattttcttacatagttgttctaaactttttgatgtgttttatttctcagaaacactgataatttttaagtttattcactttagtcgcaaacatctcacagtctttgtttattcttttctccttatttttgtctgagtagattttttataaaaacctctttgatggcagtcttacactgctagggtcatcagaaaggaaaggaaagggaaatagaagggaaccgccaagtgggtattgaagcaaaaagagctacaaggcaggaccctccattagaaatgcttatagaaggaccacctagtatgggctaatcccctctgggaaaccaagccccagtactcagcagaagaaatagaatggggaacctcatgaggacatagcttcctcccctcaggatggctagccaccaaagaaggaaaaatactttcacctgcagctaaccaatggaaattacttaaaacccttcaccaaacctttcacttaggcattgatagcacccatcagatggccaaattattatttactggaccaggcctttccaaaactaccaagcagatagtcagggcctgtgaagtgtgccgaagaaataatcccctgcactgcaggccatacatttcaatccctgtatctttaacctccttgttaagtttgtctcttccagaatcaaagctgtaaagctacattcttcaaatggagctgcaggtgcagtccatgactaagatctaccacggactcctggactggcctgctggcccatgctctgatgttaatgacatcgaaggcacccctcctgaagaaatctcaaccgcacaacccctactatgccccagttcagcaggaagcagttagagcggtcattggcccacctccccaacagcacttgggttttcctgttgagaagggggactgaaagacaggactagctggatttcccaggccaactaagaatccctaagcctagctgggaaggtgaccgcatccacctttaaacacagggcttgcaacttagctcacacccgaccaatcaggtagtaaagagagctcactaaaatgctaattaggcaaaaactggaggtaaagaaatagccaatcatctattgcctgagagcacagtgggagggacagtgatcgggatataaacccaggcattcgagctggcaatggcaaccccctttgggtcccctcccattttatgggagctctgttttcactcttaaatcttgcaactgcaaaaaaaatcaaaaaacaaaacaaaagaaaaaaatcctctttaaaggtctgaaaatttgggccatgcacggtggctcacacctgtaatcccagcactttgggaggccaaggtgggtggatcagctgaggtcaggagttcaagaccactctggccagcatgttgaaaccccgtcgctactaaaaatacaaaaattagctgggcatggtggcaggtgcctgtaatcctggctactcaggaggctgaggcaggaggattgcttgaacccaggaggcagaggtagcagtgagcagagattacaccgttacactccagcctcagcaacagagtgaaactctgtctcaaaaaaaaaaaaaaaaaaaggctgaaattccttttatgcctgtttcagtctattgtattgttgaatctttgaatgtattttctttttccttcaatctttcagtttcacaatttttgttttggtttcttttaaaagatatccatctccttggcacatttcccacttatactctaaatttatttatttatttttgatttggtttttgggtttctctcacatctctttgagcttcttttaaatatatattttgaagcctttttaaggtcttttaaagtaatttcaatgatttttttttcttagaatactggaggattattgtgttcctttgaaagtgtcataaaccgtgcttttctgtgtttcctgtgtctttgtgtgtctttttgttgatttctgtacatctagagaaacagttccttcattttatttttgaatttacgttcatttgagaaagcttttttttttttacgttattaccatgatgtttattgcatagagccatttggctttacttttgggtttgtgcataggaaagactctgtgtaagtttctcgagtataaatataatatatatatatacatatatatatatatatatatatatatatatatatatatatatataaaaccaatgttttactggcttaggagtcatcttttctcttaggttgatttttaattctaagtctcagaaaataatttatctattttgtgttggtcattgagggccagcactcctgacgtaaaagggtgagaaggtaggatggtggtgtatgatgacagattacttaatagttataatgtacattgagtgatggataccctaaaagccctgactttaccactatgcaatctatgcatggaactaaattacacttgtacccaacacatttgtataaataaattaaaaacatccactatttgggtttgctatcttgcttattcatacataaaaatacattataaatgtttcctttgacattattattgttacaggagttgaaattatttaggcagatagagcaaaaaagtcattggtaaagttttctttttaataaaaagaagtccacaaattatggtttttttttttgtttgtttgttttgttttgttttttttgttttaacaaagagcagcctgtaaaattgagctgcagacatagataagcaagctggaatcttgcatgaataaatgccggcagctgtgctgcagcttgctctgcagtgaacaccaagaaataagtattcagacaattacagctgaaagggaggggagcagctcctccaagacagtgctgctttaagattcatctgccaagtatttattgagaaggctagttgaactacaatttagacaaacaagaaacatctacaaggtggctatttggggtcgggtcatgaggcacatatggccttgtttataacatctaaaagcactcaaaccacattcttaggaggctgtgttcagcactccttattacaaattctattccttgtcctattttcagggtcaaggaattacagtttcatgcacaaacaacatacacacagtgcctcagtatttttccatgcctcaacctcaaatgccttgtacataagcttgaatgtattgtcatacacccctcacatttcccccttctttaattcttagaacatgcggattatccaatgcaaagtaagcttctatcattcttccctggtcatagttggttgagtggcagcacagagccatttgcagatgcctaaaagatacaaaaaaggataaacagtggctatcacccaaatttgtatgtttagcccagacaaccaagtatttgggttcaaccactgaaagtcttgtaataactgaagggtgtttgtaattgctgcaaccatcgcttaaactgtttatttaattcacactaacgagtagaaactcgagaagacaggtggtcgccgtaagccctgtgtaggtgtgccttcactctctcccaggtatattgggagctattatatggcataaatgtgacacagatggaattatattgctaatcacaatgtaaattttgacaagtaacgaatgcctgctgtggatcccctagccattcagtggcagcttcaagggcctctaggtgagataaaatatttttatcagtatttacatgtttttgaaattcatggattacattgtataccatgtggttcaccactgaggctgtatgaatagattccgtcaaagagacagctgcagtagtagcagttgttagtataataatagctgaaactaaaaaggcaattagagtggccagaaatttttttttttttgagtatgagacaatgcttttctaaataactgcaagatagaatcccctttccagttccgggttggatatacagggagccacaatcctgaccaccactttaaaataatgacatagggccgggtgtggtggctcacacctgtaatcccagcactttgggaggctgaggtgggcagatcacaaggtaaggagtttgagaccagaatgaccaacatggtgaaaccctgtctctactagaaatacaaaaactagttgggcgtggtggcacatgcctgtaatcccagctacttgggaagctgaggcaggagaatcgcttgaacccaggaggcagaggttgcaataaactgagatcacaccactgcactccagcccatgtggcagagtgagactctgtctcaaaaaaaaaaaaaaaaaatcatgacatagtttataattgtgtaatgttttgatgagacaagcatgtagcgtatcaactactggaagagacagtaatactataaaaggattgattctgttctgtgttaggaatatcctgcgcaaacaaaagtatataagggtgtatagcacaaatcaggactgtatcagtaacattattgtgcaaggagagggtgtagttgtgaccgctataaatgtaatcacttttattatgaaagaacccattcaaaaaagggaagacctagtttccaaatttgggtatgagcagggcttaaaacttattccccttttgattgtaatattcatcctgaaatcccatactctgaccaggtgatggaactattggatggagtcccaaatccaatagtctgatttgcagacatgagatatccatggggtccccagtcaagtaaggtgccattatcaaacagaggtccttgatgcggcacaggttgtctgcatggggaccactggacagcctcaaacttatgtcgccagtcttttctcagatggcatatcagaagatcaggcatttgtataatttcattagaaacctcagtaagattactggtaacagcagaaataaaagtcaagtttgcaggcttagcatcccttttgggctgatagtaaagatactcctgaggaatgagagtaatacacttaggtgcccatgtagagaaacagagaggaggattgctagacaataaagtcaaggagtcattaagtttaatccatcccaaatttccagttagggagtaagacaggggcatccatcgacctcccatccaagaagtattataagatgacaaaggcgggtcagcatcccaccacataataacattgaaaattgagggattcagaacatgactccaataaacatgttcttgagctaagcccagttggcaaagaacaagaattaccagccaccccaacatccatgtctgtcttaccttctcagaagctcccccaattaccatcagatacataagaaactggttctctgcagtttcaggggctcccatagatgcaagccagatagttccctgttggtccagtttctttagctgtccccaggtaatgtcaggtgccttccaagttatcactgtcagttttggtcgattctccaatgacaggtccttcatcatcaggaggggctttttcagtagtctctaactcatattatggcttcactcattttatggggatccactctagtcctgtagttcatgaaatacaaaccgcaccttgaccccattgcaatgcctcataaagtccctcccaattccctgtacaaatgtctcgaattaacacctttcattttgtgacctcaaacagcttcatcctatgaccaatagccatctggccatcttatccaatattcaaaaaatgaagagtaaataaaatttttgctcattctcgaggagagagctcccatattccccccttttcatttattaagatatgctttaagggtttgatgagcttgttcaacaatggcctgacaggttgagttataagaactatcagttttgtgttgtatgtgccaaagttgcaatgcatataaaaagctagtgctaagatagcaaggaccattatcagttttaatagtctgtggagggcctaaggtcataatagattcaaaaagataagcaattgcatctttagtttcttctccagtccatggagtcacatatatgaggcccatataagtgtccacagtaacatagagaaatttaaagcatccaaaaggtggatgctgagtaataccagtttgccaggtagcattaggtaccagaccttatgggttggcaccaagtcccaatgaaaaaagggagagagaatgctgttggcaatcaggacaagttttaataatcatgcaagcttgatcaagtgttaaatgaaacttgtttaagactgtaggcagactgggcacagtggctcacacctgtaatcccaacactttgggaagccgaagtgggtggatcacctgaggtcaggagtttgagaccagcctgaccaatataatgaaaccctgtctctattaaaaatacaaaaattagctgggcatgatggcatgagcctgtaatcgcagctactcaggaggctgagacaggggaatcgcttgaacctgggaggtggaggttgcagtgagccgagatcacatcattgcactccagcctgggcaacaagagtgaaactccatctcaaaacaaaaacaaaaacaaaagactgtgagcattctgatgaaaaaaggaatgatcagcttgagctcacaaatatgcaggacagtctgcaaacctcatctgtgtttgtaccagagcatcagctggagtgttccctgctgacaagggaccaggtagcccagaatgagagcgaatatgtgtgatataaaaagggtgatgatggggacaaaggagctcctgtgttgtgagaaacagggttagtaggggttcattagtaatgccttttagatgtgtgagatctaaatgagtaatactatacaccgcataagtggaatcactaattatattcatgtcttggtgaggaaaagtttgtaacaccaatattagggcacctaactcagcctattgagtagttttgaaatgttcctggattttgtgctgccaattttgcatggcatcttgccacactatagctgactttcccattttccttgaaccatctgtaaagacagtagtggtgtgaagcaagggctcagagacaacaatacatgcaaatttaacaggcacagtttgtaaaaagttcaggagcttagaggctggtaaatggaaactaatattaccaataaagttgatcattgcaacttgccaatcaagatcacaggctaagagagtatgaaattgttccttgcttaaaggtaagaaaagagtagtagggtcatatcatgacaattggatgcaatgtcggcatcccgttgtgagaagctattaaatctgtggtcttttgtatgtgtttagggagggggttacaagacaggtaaagctgccccaaaggagaaacatttgttccaacttgcccaagcattcctgtaggactttgaggggtattaaagatcaaaagatgtataggtctgtcaggatctagacccaatatacacctttgggtcaaggcttgctccacagcattaagctcagcctgttccagccaagagaggtcttgcagtgaatttaaagcagagtcacctttcagggtgtcaaaaagattaaagtaatttgtaggaatgcctaaataggatcatatccaactaatctttcctaggactcaatatcatgtattaagggttaagtgctgtggaagaattaattctgtaagttgtggcctgagggtagtagataagagccacagagtatatagagccacagagccatcagctggactttttcttgtgcaataatgagaccatatagtgacatatgctgtactaccattgcatgaagttgatgcagtaatgactgatgctgagcagctaccaaaatatcatccatatagtggaaaatttttgcctaggggaaggattgatgcacaggaagtaagccttcatgtacgtaaagctgacatatagtagggctattcatgatcccttggggtagaactgtccattggtgacattaaactggttgcagagtattgtaagtggaaacaataaaagcaaaattttctcgatcttcgggatgcaagggtatggttaaaaaaaaaatcctttaggtcaattaaaataagaggccagtctttggggatcataactggagaaggtaatcctggttgcaaaggccccataggaaacattacagcattaatagcacagaggtgatgcaataacctccactttcctgacctttttagaatggtaaaataggagtgttccagggactagtagtaggctcaatgtggcccgtgtctagttgttcttgtacgagacattggatgtgttgcaatttttccttcttaatgggccacttctccacccatagcaggctagtagttttccacttggttttgatacttttcaaaggagcagtggcccctaccaaaaagggggcaggacagagaggtttaagccccactgttctaggccatctcattaccacagagaaaatagaatctcttaagataaagggctgaacatgggtgaccttgccttccgggcccaaaagtggaagaatatgcctactttttaatggctgttgataccctccaacacccatgacagaacatcaggcaggagaggcccaatctgaaggccactgtcttttagctattatagtttgatgagcccccatgtcaacaattctcataaacataactccattaattgttacttctaagtatggtctatgacatgacactggagtactccaaaaaaccttcatgcctgagtggccgaatcctgaggccccacaggtctgttgaacattacttgaaggtaaggagtaagaataatctgagcaaggcaagtccctttagagatggcatggacccctgacacctgtgccataactttaatttctgctaaatagtctgaatctatgactccagagaaaatttgaattccttgaagtgtacttctgataatcaatccaaacgttcctctgggtaatgggccatagattccagtagaaatcagctggaccccatcttgctctttaagcaccatatctgatatgactgtgaggtccagccctgcgctgccagaggtggctgaagagaggttatggatgctatttctggtcctgactcagaggggaaagtcattccccaagtctgggaattggtgttcctccatggatttttctgggcattggaggtcttgcccctcttcccgtttcccaataatgggtttcatccttatcaaattttgaatttcactgattagcccagtgcttacctttgctgaatcgcaggcattcttgagagggtattttaggggcctttgatttctttgggactcccttctgttggcattctttggccatatgcccagtttggccacaattataacatgtggccccagtcatcactgcagcaaaagtctgagccagataagttgtaagtgcctacattctggcacgttttaataaacacaccgatttcagtggcagtggctcagactagggttattgctgcctgacaatccttattgcattttcaaaagccaattgcaacataagaagtttagcgacttcaggatgaggtacctgtctttcaattgcagcctgcaatcggttgataaattcaacatatgtttctgtggcaccctgtttaaccatcacaaaggaactctggaattgtcccatgagtatcctcttccatgcctgtatcgctagctgtgagcattgaggaaatagacggccatccacctgagcctaagcctgagctgaagcaaaaggccctgtctccaacagcatacatatcaagctgtatcaggatattatccaaattttgcaaggattgctgcatggctagatcactgtactctctccaccacacagtatattcagcagctgaagccaaaacttttcccagagttttccagtcatgcacagccatctcataaccatttcccagagcctcaaccatcccctgcgtaaagggtgaatgtacaccatttttgcagatacttctttttaattccttaaagacaataaaaggcaagcgctcatgccgtctcctattattttgaacaatgacagggaatgcactaaaaagcgcctcaggatcttccttcctcagtccctcctggaggcatccttctagtagggaggttttttgaggggacacggccatccagtcatataaatgttcactgcctggaggtcttatccaagaacagtcccttggacggcctccaatctactcaagggggatgggaggtgctattgcctgaatggggccaacagatgcaggtcgtgtgaagggtggaggaaaagagggcaatggcttttctattgagagaggaaaaggctccagtccgtcctcatcatcactagaaaaagtgtcttctttatgccctactgaagggagtgaagttgggggaggaactccttcctgttgttctgctttctgtgtccccttttcctttaaattttccgaattcccttcaggtgaagaaaatgggcaatctgactcaccacgatctggcatataaagagggtacaacacagaacatgccagactccaggtgatcaaaacggtaacattagtaaaatggacctgctcaaatcctcttttcaggcagcaatctgcctgctcccataactctaagtctaatgttccttggtcagggaaccaagggcattcctgccgaattaaaaacataagcttatgcaaagcttcagactctatggtgcactgaataaccttaagtaaatgttgcaccgttttaaaaaatactttctgctctttggacaactcctgatccatggtaacccgacccctggtattatagacgtcggtgctgtcctcctgaaaatgggtagggactgtcccttaccggtattccccgaagattggtgagtcatcctactccatgcataacttcaaggcaatcacgtcggagtcaccacttgatcatgtccgagtcaccacttgatcacgtccgagtcaccacttgcagcttgttctgcagtgaatgccgagaaataaatattcagacaattacagctgaacggggaagggagcagctcctccaatggagtgttgctttaagattcatccgccaagtatttattgagaaggcttgttgaactacaatttagacaaacaagaaacatccaccaggtggctatttggattcgggtcatgaggcacatatggccttgtttataacatctaaaagcactcaaaccacattcttaggaggctgtgttcagcactctttatcacacattctgttccttgtcctgttttcagggtcaaggaattacagtctcatgcacaaacaacatacacacagtgcctcagtatttttccatgcctcaacctcaaatgccttgtacataagcttgaatgtattgtcttacaacccccacgctatgccagtaggaaaaggggttgcctggggactatgcctgttcaaaatggtggctccatcttcccttttctttgtaaaccacatgtacagtaacaaccaagaaagggtgaaattaaagtaaaacttttgattgttgacttgtcaaactggatttgtatggattaataggtctagcacaggtagaagagagacaaatacttctggtttatctgatttaatgcaaatacaggcaaacctggctaagaaatgcttttcaccaaagtttgtctgcaatttgaacgctgtaggttaaacttatttaaaagtactctggacagattcacttgtaatataagcatgttgtagtttctggtgtttaggactgatttctgtttatttagttttctgaagagacacaagagacagccctagctactatcagacttcctagagacaaattgggcaaatgagccctacaaaattccatttactttaaatataataaataataatctctaaacataagaatttgaccagcgttaaccactttactttcccaatgcactgatacttctccttttttcttagcataacacaaaacaaacacatgaccacacactatccactctccagtgcagatcagagtaacaaaggcacaaagcaagcttcagaacacacagaccaccatgttcaccacatctacatttagagctgattaagaagagaagcaaaatcaatgagaagctgacattagtgactaccctgttttcagcacctattgtcacaagaagaccaaacactctcattttaagtcagagcattcacttttttggaaaaaaaaaaaaaagtaactttacagcatatatcctgatctctcactctttgcaagatgacactggctttgggcatattacagacacccttaagacacatcgcctggcctggcttacctgatacaatttttaatttctctgaagtaaactcaaattttaaacatgtatttctttattaacttatttcattaatttcctcggggacttaacagaaaatatattcaattttcattcacttaatcttaccacaatagatggtgtaacatatccagaagacagccatatgtaagacatgcccatactccgaagcatggaaagcttaacacaccagggacttgaggaatcaacactataacagtgcaaatacacaaatatttaaggaaaaatacgtcacccaacagacagcatctgtggtcaccactatccagcattctccaaaataagtagctgttaatggcttatctaaaagttggcttatatataattgtcaccacaaattggttctgaacataatttagattccaatttttgatattaacaacacagtaattatctggtaagatatatttatagctaacttgtaattagacttatgaatgcacgcatatgccttgggtcacagtgagagaaaaactcttgagttatttgtagagtaccttaagatttacattttcaaaacatgtccttaagcttagttttagaagtattcttcccagcatctcttcaccaaactgtatcagttttatttatttatttatttatttatttttgagatggagttttgctcttgtagccaaggctgaagtacaatggcacaatctcaaatcactacagcctctgcctcctgggttcaagcaattctcctgcctcaacctcccgagtagctgggattaccggcatgcaccaccatgcccagctaatttttttgtatttttagtagagatggagtttcaccaagttggccaggctggtcacgaactcctgacttcaggtgatccacctgcttctgcctcccaaagtgttgggattacaggcgtgagccaccacacccagcaacaattttaattttaataactgaggagtggggagggctttttaaagttttattcctttctattcagtttatcttatcctatacggaaatggaataaagtgtggtgtctgtcctaatgatatttatttgtggtgatgcagaaatatctacgctcccaagcaagagatgaaaaatcatgttctccccaaaatggggaaaccagtgttacctggggcccaaagagatgttcaggctacatctgtcaggattgataccataagagaggatcatctctcgagcacagtggggctcacctgagattttggtgagtcatgtggatgacatcagagacaagcattacccaaaattagagtccctataagactttcacataagatggtcttagaatatggtggcccaactcacacagaagaggatggctgtgcatccaagtgagactgatatttttttctcaggagccgaaatcttaatgtaggagatggccactcactaagtagtcgaagcatgccctgatggaactctctggtggtcagatttcccactgtctccctgagttgcataaagcacagaacaacttgcctgcactccagcttctagcatgtaccaactcagcagaaaacacatccctgtctattttgtttcaaaaatactttgtttgccataaaaaagtgaattaatatagtaaaagcccaaggactgcctagggtaggtagcaggtctgtcatcaccagaagtatttaaatgctggccagacaaatactctgtggaaataagtttcactctttgtgaaaggggtaaaataaatctttgtcttgggcactctcagatttagtgaagatcttagcatacaatagataaacaacaacttctgtttactaaataaactttattttcacagattacaggtgaagcaaaatattgatataactctaagacattaaggtatcacaagacaacttatgttctttatggggtttcaattaagaaattacatgaaaaataagtccatgaaaggagttctgatgctctaattagcatcagaactgctctgatgggcttaaaccattgtgaaagtcctagcttgcttcctactcaaagtctcttctcatgaatcctatgcttaaaagtcaaacagataaagcatcactacatcaaacacaaacttcaacactcttaacatttaggtgtaaatctcatctgaaaatcattcaaaagctcaggtcatctacaagaaatctgttctttgcagtttagtatcagtaaattaaaaggaaagcaggaaaataataagataaagccatttaattatttttgtaggtaagaacataacattggtttatcagttacatagtattttcatgcttcatccatgccaggtacttaatttttaaccaactataacacattacaagtggagaaatagctaaaaacatagaaaacatattaactctttaaagggtagagaacatgcccagttcatatacattgcctaatctagcattccaatcttagtaagacaccaccatccacccagctataaaatctaagatcaggaagtcatctatcccttccccataccatcccatcatcaagcctctcctacctcttaaacctctatcaaatccatctgagctcccgtctctactgtcactatgcttcaggccaccaatgcttttcaattttttcataaactagccttctaactgatcttattccaaacagaaggccaataattatttccttctaccaggtctatttactactatgggtaaaaatagtccgtaacattcaaatctcaccacactacttttggggccaacactttttacagctttccagagctcctacaagcctactctaacccctgcctacttcatcattcctgtcattcccctcattcagtgtcttttcttcttccaaacacactgtacttctcccacttccctggacacatccaccttttcaacctcagcttctgtacctgctgttctctgaagcattctttttcttcctgtcacccattcttcagatattagctcaaatgtcacttccacaggatgccttccttgacctgcatcccgacatcctccattcctcttccatacacaaaggccaaactttacttcataagttcttgtcatactttgagcagttaacactgatataagtgagcttttcctggctggatgagtctctttcactgtgatatgtcctctatgatattagcaactgtctatctttgcaatgcaagtaagtttggtggtaaagacagaaccttcacaagcagataatcagatatttatggaataaataaaatctgtaaatgtgaaaaaagaatcatgggaatggtaaatttgatagtgaaaaactgtctcttaaaaagaggctaggccggacatggtggttcacgcctgtaatcccagcactttgggaggccgaggcgggtgggatcacaaggtcaggagatcgagaccatcctggctaacacggtgaaactccgtctctactgaaaatacaaaaaattagctgggcatggtgacgggcacctgtagtcccagatactcgggaggctgaggtaggagaatggtgtgaacccaggaggcggagcctgccgtgagccgagatcgtgccactgcactccaccctgggtgacagagggagactctgtctcaaaaaaaaaaaaaaaaaaaaaagaggctaaatctaatacagaactgtacttagaaaaattaaattgtaaaactttaataagcttttaacacaaaatggctcttataaaacttatttttataatttaaatacaaatcaaattcagagaaacacaagttaagcctcctttaagttacttttggtttaaaacttttgagtgttttaaccaaatacatacagatttaactgaccaaatcacagaaaacctgtttgagatgttaaaccattgtaaaacaatccgctgaaccaacaattaaaagctctaaagtaaaagataaaatggcctaaaaaatctattttctgtatcataaaggaaaatatagaagcctcctcagaaataaaactaagttagaatattatgtctaaatgtatctgtcaggtatgaatctaaattctagttagcatgcagcacttattaattgacatttacagttagtaatgtatccttaatcaattaggatttcatgttgtataaaagacactaagtcacacacaatgctaactttttctttgttaaaaatttactctttgagccctctccctctccctctccctctcggtctccctctccctctccctctctttccacggtctccttctgatgctgagccgaagctggacagtactgctgccatctcggctcactgcaacctccctgcctcgttctcctgcctcagactgccgagtgcctgcgattgcaggtgcgcaccgccacgcctgactgatgttcatatttttttggtggagatggggtttcgctgtgttggccgggctggcctccagctcctaaccgcgagtgatctgccagcctcggcctcccgaggtgtcgggattgcagacggagtctcgttcactcagtgctcaatgttgcccaggctggagtgcagtgacgtgatctcagctagctacaacctccacctcccagctgcctgccttggcctcccaaagtgccaagattgcagcctctgcccggccgccaccccatctgggaagtgaggagcgtctctgcctggccgcccatcatctgggatgtgaggagcccctctgcctggctgcccagtctgggaagtgaggagcccctcttccctgccgccatcccatctaggaagtgaggagcgtctcttcccggctgcccatcgtctgagatgtggggagcgtctctgccccgccgccccgtctgggatgtgaggagcgcctctgcccagccgcgaccccttctggaaggtgaggagcttctctgcccggccgccccgtctgagaagtgaggaggccctcagcccggcagccgccccgtctgagaagtgaggagcccctccgcctggcagccaccccatctgggaagtgaggagcgtctccgcccggcagccatcccatccgggagggaggtggggggcagcccccgcctagccagcctccccgtccgggagggaggtggggggcagcccccgcccagccagcctccccgtccgggagggaggtggggggcagcccccgcccggccagccgccccgtccaggagggaggtggggggcagcccccgcccggccagccgccccatccgggagggaggtggggggcagcccccgcccggccagccgccccgtccgggagggaggtgggggccagcccccgcccggccagcaaccccatccgggagggaggtggggggctcctccgcccggccgccgccccatccgggaggtggggggcgcctctgcctggccgccccttctgggaagtgagcccctttgcctggccgccacaccatctgggaggtgtacccaacagctcattgagaaggggccgtgatgacgatggtggttttgtggaatagaaaaggggtaaatgtggggaaaagatagagaaatcagattgttgctgtgtctgtgtagaaagaagtagacgtaggagactccattttgttctgcactaaggaagattcttctgccttgggatgctgttgatctatgaccttgcccccaaccctgtgctctctgaaacatgtgctgtgtccactcagggttaaatggattaagggcggtgcaagatgtgctttgttaaacagatgcttgaaggcagcatgctcattaagagtcatcaccactccctaatctcaagtacccagggacacaaacactgtggaaggccgcagggttctctgcctaggaaaaccagagacctttgttcacttgtttatctgctgaccttccctcctctattgtcctacgaccctgccaaatccccctctgcgagaaacagccaagaatgatcaattaaaaaaaaaaaaattactcttgaaaagaaaacccattcaaagggttcaccttgtgtttcaggacacccaccttatcttctgggtatctcttttatttctaaaaatatatgtacctctattaaaggaaagttaaaattttgattgtgtgtatttatagaagtgctttgttgttgtttttaacaataaagtaccagggtaaaataacttcccctaaaacagtaaaaatggttctttttatgagtatgatacataatcaattattatcaagtaggtacattgcacatacacatatcaagcaagatttataccctgcaggtttctggttttacattcaattttaaaaccaagaaataatggaataaaggaaagttaaattacatataaaccaacacttctattaactcataccactagtgaaacaaaactctaaataagtagagaaaatgaattcacacattggagctctgaaatgttctgggtcttttatctgtgcatttatttttcccattgaatttaaagttcaagccaaaatccattaataatgtttagaattattaaaggccacagtgtgacagattttagtgcaaccaggcattaagaagcatgcttttctctttaagctgagccaacttttattttagaatttctgtaattcaacattctttcccaccaaaacacctaaatctttttcatgtagctgcaaacgactacatgacagatgtgacaaagttgttagtttatgtccacttcctttactgaatgtggagtgaaaggccttagttttcaatttacatgtggctcttctccaaaatcttaaaaaatctcatgtttatattagaaatcaacaggcaagttcaggcatggtggcttacacctgtaatcccaggactttgggaggccaaggcaggccaatcacctgaagtcagaagttcgagaccagcctgaccaacatagtgaaaccctgtctttactaaaaatacaaaaagtagccagatgtggtggtgggtgtctgtaatcccagctactcgggaggctgaggcaggagaattgcctgaatccgggaagtggaggttgcagtgtgccgagattgcaccactgcactccagcctgggtgacagagcaaaactccatcttaaaaaaaagaaagaaagaaagaaagaaaaagaaatcaacatgcagtagtcagtgagcaccaaccatgcaattgtgctaggtacaagagatggaaaaaatattcctgaggtgggagaaacatgttaacagataaattacagaagacagacttgacacatgggagtaaaagtcattagaaacagaaggcctaattatttctagaaaaggtagtatttgagatgggtctcaggagaaaagtaaatgttctttgctgggagaagaagatggagacacaacgaaaagaacccatgcaacagcagaggcagtaaataattattcagtgtggcagtgatgtggaagatagagacaagagccaagactagcagtttggtttggaagcagatgagagtctttgtaaaacaagttaaggggtttggattttcctttttgtagacaacatggtgccaagagatgtcattaggcaggcaagcaatgagagcagctttaggctttgaggataatgcctctggcagcaaggtggaaggttaacagcagtagggagaaactggtggcagaaaattaagaggtgtttatgactcagtgaggtcctcaggtcaggagtgattaaacagcccatgtcagtgattgaagcatggttttgaggagagcctggtgactgatggacatgagggtgagagagacatgcatcaggacagccagcagtaatgttcctggcctagtaggttgtgtgcatggtaatcaccttccagaaaggatggagattactttcatttttacaagtacttggcaggatgagggaattgtactgtgatcaggatgacaaaagattacagcttcagataagttgtaggtgaaaatatagagctggagttgccagtttataggttagaggggaggtcagaaaagcaccaggatgcacagggcattcagcaggaacagaactcactcccatgtatgggactgcaaaggttgctgcagagaacaggcattgggtacctggccactgataccaatgggatgcttacagtctctccactgatttaagaattttaggctgggcacgatggctcatgcctgtaatcccagcactttgggaggctgaggtgggaggatcacaaggtctggagatcgagaccctcctggctaacgtggtgaaaccccgtctctactaaaaatacaaaaaattagccgggcatgtggcaggtgccagtagtcccagctccttggtaggctgaggcaggagaatggcgtgaacccaggaggcggagcttgcagtgagccgagatcacaccactgcactccagcctgggtgacagagttggactctgtctcaaaaaaaaaaaaaaaaatttttaaaacaactattctcaagtgttgcccatgtctctgaggtaagtgggggcccacaccactttgggggcaactgtctcctttctgcaggcagccctttcttatctggaattcagtctcctcatcttcctgccttctcccttgcatatctcctgcttgtgtaatagggtggaaagtggagggcaggacaaagttcagaccagtggcactggttagctaaaagatcactcgtttcattctactagacagttctggtctgaggcctgggttctcagaacataaaattatcactgtctcctttattgcatccctgtattatccctatccctcttagccagggcagctggctgacatccaccctctcaagaggagatgtatggacagaagacctggctcagaaacactgctctatgaaaagggcagatagttatgtaagaattttgcaaaaacttgagaaattaaaataagggagactatgaatgcaaaaacattaactgtcaagcaagtaagagataattcaaagaattttttaaaaagatgtagtccacataacttaaatcatgaggaagactggcagatgacagcatcagagtggatttcctaaataactgaggaggtgactgggaaaactgagccacctaccaaaacagctttacagagccaatgcatctcaattgttgtagaagaagatgagttctagaactcttatttactctaaagttttcaaatacattgaacaccacttaatgttttcctcaatcccaagcttcttgtaaaactttgaccctgccaaccatggcatcttagaggcagataaaagcttacctactttctggaacttcagatttctaaatatagcacatgcaatacagggaatgcactcagtatgcttgtggatacaataaagtccactactatacctctcaagcaggctttgttgacttcagctctcctgacatttggggctgtcctatgcattgtaatatgtggagcagcatttctagtgtctgtacactaaatgccagtagcaccctttcccaaagcaagacactaaaaattttatcattctgtaaaggaaatccacagtggacacccacaaagcttcctgatctcaaaacatgccactttattccatatgtagattttgagtttctggaacagttattttatccttatgacaatcccatgaggtagaaaagctactgacaagatgcctgtcatattcatcaatggcagtgccaccaaaggctaaagtttcattttaaattcccttatactttcaaaatcaaccgaatttattttgaaaaaaatatggccttctttattaaaaataacaacacacatacacggaggtaaataagcagtatacatttaaagctacattgttttgagatcaagctgactctataaagcagctgtcccatggagctaagcggtagttaggaattgtggattctgagcttaatttattgtcagcccttgggtagatcataaagcagctataacaggagtcaatatacccacccaaccctaatagttttgctctgagtggaaatgtgaaatctttgctgaatgcttttgaaaaagcggagtgaaaataacttagtccaggaaggtacagcaaaataaataaggaatattttaaagtaattaaaccaccagaaatatctgatatataatcctaccccattgtctctgagaaaagggaaaaagagaaaaacacaaagcaagctatcaaaagcagatacagcttttaaaagttctatctaattaaccccactaagaaattttttggctacctggtgtatgccaggcactgtataatgtaggacagtggtttccaatctttttggcaccagggtctggttttgcagaagacaacttttccgcacatgtggcgggatggtttccttttgggatgattcaagcacattacacttactgtgcactttgttgctattatgattgcattgtaatatataatgaaataattaaacaactcaccataatgtagaatcagtgagagccctgggattattttgctgcaactaaatgttcccatctggaagtgatgaggggcagtgacagaccctaaggcatcagagtctcataaatagtttgcaacgtacatctctcacatgctcagttcacaatagtgtttgcactcctatgataatctaatgctgctgctgatctgttatgcaagtgatggggagtggctgtgaatactgatgaagcttcactcacccaccattcacctcctgctgtgcagcctggtttgtaacagaccacagactggtatcagtctgtgccctggtgttgaggaacactgatgtggggcaactacattgattgattgagtgagtgagtgggtgagtgcaatggcgcaatctcagctcactgcaacctccacctcctgggttcaagtaattcttctgcctcagtctcccaaaataggtgctattacaggcatgtgacactatgtttggttaattttgtatttttagtagagatggggtttcaccatgttggtcaggctggtctcaaactcatgatctcagtttattctcccgcctcagactcccaaagtgccaggattacagacctgagccactgtgttcttctgacaaccacatttattaccagccatttattaccaggacacctatgttgtgcagtgcctggcatacaccagttacttaataaacagctattgatctaatgcaggactaataaggtaaggtgtattttttttccttcaacatgctgtgcctgtttcagatgcaaataagacctcaggagtcggcctgaagagacttaaaataaaaaatgttcccccagatgggaacatttagttgtaggaaaatcaagcagtcacttggatggtgtaacaagttaggtatgaatgtattacctgtgccagcttagtgagatgcatgtttacatcacataacaaacacgtgtctgccatgctcagggcttagagtctaaatttctgatgagaaataaagtggtatctagacaaccccagagagtgatattccatacatccataagcattagtagcatttctaaaaattatcaaacatccaacaagtcttttaaaaacaagatatgctaacatgcaagcagtttagcagtatttctaaaaatgataaacagtacaacttcattcacctgaaatggagcacaagacccttctgaaggaattcatatccattcctgcaaaagttctgtggactcttgaaggtagcacagaactaagtgttttttgtgtgtgtttccaaagaggttttagccgagcctttggcctctaacagactctctgattaaaatatggcttagaaactctacctgcctacttgaaaaagcatcaaaactagagaatgcttttcacaggtgtgaaaaaatgaaaacaaaatcacattcttctctttgcaattccctttcccccaccttccacttctattaaatatacttcagaataattgtgcacaggtacagagaccactacatatctaaaaaaggaaaaaaccctcaaatatatggggatgcactggcaatcttgcctttgcggaaatcattttgtttcctccagacagaagtgtctcactattttcagcattctcatctaacaggcagtttccactgactttgaaaggggtaagcttgaatctaaactcttaaacaagaacgagggttcaattttctagtaatgaaaatcccagacatgtttttcaacctaccaaatcgttatatttttaattcacccttctttctctctccacaaacactaacatcaccacccacaaaagaaaaaggcaatccctccaattttccccaaatgtgcgctgctgctagctgggaagctgtgtagagttttgtaatggagtgtgaactgctgcccgggatctgggctcatgttctatctcctaaccagtaagaagagaaggaggacaaatccactgagcaggaaaaaaaaaaaaaaaaaaaaaagaaaaaaaaagaaagaaaatctttcctcctcatttataacctctcatggatgcagcgctgacgagggtcgccaggtgcccagggcgcctgccaagcggcccactggccagcgcgtttctgcgccgggccgggtccccgagctctgcagttctccgccctgcctggaaaggaagcggccccgccaggtagtgggatcggccgccgcgtcccgtcctcacccttggccccgagggggtgacatcctcgatgtgccctcggcccagaaaacgcgccgcttcccatggagggcgtcggcgacaggaaggacctcccctgctccttaacaaacgttagggtcgcagtttcctaagagacgcgactgggattgggggagggggtccaggcagagactagtgctgggggcagaggaagcgacactaggctgcaggctggtgtggaaggaaaaaaggaagccctggaaatagccacagatttttccagcgggagtaggccccccccgcatttttcctggactcaacgatggcacccggcaccgagccccccactcgcgcgaagaaggtgcactccacactgacggatccctgtaaaacacacgccccgccatcggaaggaccaggaaagataggcgcccccatggcaaggccctggcccccttctttcctgggcgccttaggtggtagtcggccacaccaaaaccgccagccaggaaagggccagggctcagggcttcctgctgccccttgactccagtgtcctctgcccaggaatttcaaatccgcagagcagggcgcggcaggcgcttccaccaaacaccccggctagagcaccccaggaggccgcctcctggccagcatccctgatgctttgcggctgctggggaaagcaggaaccctagtttccaggcttccccgccagagagggactggaaaggccatagaaggaaagttcctcattccataggggaaggatgccaggagagagagggcagaaggtggggagcagcgtcgggaagatgtttctggcttaggaggcttataccatccaagtcccggcggtgctataataaataaattcaccccagtattccgggaggccaaggcaggagaagcactcgtgtccagaagtttcagaccagcctgggcaacgtggtgagacctccgtcactaaaaaagacatttagtcaggtgtgggccacggctgcaattccagctactcgggaggctgaggtgagaggatctcttgacactatagtgagtcataagcttgtgccactgcactccagcctgggtgatggagcaagaccctttctcatagaataaataaatatataaataaactcggccgcctgggttgggccgtattcctaccctccaaaacctaatatagatgcatgtcaggtctttctagcacagcgctgcagagactgccactacgcgtgctgggtgctgcttgacatggccagtggctcagtaagaggaggagtaggagtgaaggagtggagaaagaggaggaggaaaagagaaggaagagaggaaaaagtagagagaaaaagggaggaggaaacaagaagaagaggagaggaggagaaaatgagaagacagtaagaatagaggaagaggagaaaataaacaggagaggaggacaaggagactagtagcaatgaggataaaatgaaagttgggaggaggagaaataggaggagcaggagaggaggaggagaaaaagagaaggagaagatgagaagggaggaggaggagaggaggaggaagaaaaggagaggaatagacgaggacaggagaaggaggaggaggagaaggagtagagaagaaggatgagaggagaggaggaggagaagacaaggaagagcagatgaggataagagtaggaggagaggaggagaggaggaggaggagaagagaggaggagacgaggatgagaggaggagggggaggagagggggaagagtaaaaagaagaggagaggaggagaggagaaagagaaggcaaggaggtggaggagaggaagaggagatggagagaaggagtagaaggaaagcaggaggaggaaaaagagaggaggagagaaggaggaggaggagaggaggaggagagaaggaagatgaagggaagaaaaggagaggaggaagaagagagaggagaaaaggaggaggaagaagagagaggagaaaatgaggaggaagagaggaggaagtgggggagaaagaggagacaatgatgaggaggagaggagggggaggagaaagagaaaaggaggagatggaaaagaaagagaaaaggaggaagaggagaaaaaaattatcactttgaggcattcagtaattatgactattgtaatcgcttttggaataaagtttaaacttaataggagagatgggaacaaagatcaaagatccagattatttcagagctcaatttcagagctaaaaaaaaaaaaaacgatatgtggtaatacacctgtggacgttgccaatacaaaagagttgcagtattttggttttggatctagccatgtgtcaccatacacaatgtatgcagtgcctaggagagagcagagagccacaacacttaggtgctgggcccagtgaaacatcacaatctctttttggtcagagcccaaacaatagaggagagccacatcacctagtttctaggttcagcaatacatcacgataccttctgagaggaagaccaaagcaggagtgccacatcacctaggtgagagccccagagatacggcacaatgccttctgtgggtagggctcaggaagaagaggaaagttacataacctaggggctacagccagctatatgtcacaatcacccgaaggggcagggacaatgcatgagaggagagtcacatcaagtaggtggtgagcaaagcaatatgtaacaatcagaagagagtgtcatcttctacatgctgggccatgagatatgtcacaacatcccctatgggcaaagcccaggtaagagaagagatacacatcaaatagttgatgggctaagagatacttcacaatgccccctgtagaaagagatgaggagaaataaatcagattgcctgtgtgctgagcccagggataagtcactatttcatctgcggacatggcccaggcaggcgaggagagttacatcacttagatgctgggaacagagatatgcaacaatctcttctataagcaagaccctggtaagaaaataaagatacatcaaatatttatggacccacagatgccccctttttgacagagtcaaggcaagaaagtcacatcaactttgtcctgggcccagcaatatgtcaaaataccttctgaagacagggccaaggcaaatgagtaacaccttggagctgggcccaggatatatgtaacaatctcccctgtgggcagaacttaggaagaagagaagtgtcacattagctaggtgctgagcccagggatatgtcaccatccctccaggcaagagatgagaatacattacctgggtgaggagtgcagggagatatcacaatcccctttttaggctgggcccaggcagaagagtcacattgcctaagtgttagaatgagcgatgtgtcacaatgccccttctgtgcagcaccaaggtaggagagaaaacttacatcacctgagtgcaagtcccagcgttatgtcacaatgcttcctgtaagaggcaccaaggcttgagaatagactcatctcacctaggtgctgggtccagcaatatatcaccattctatttgtgaaccaagccaaggcaggagagtcaaatcaggtgtttggcagaggcgtatgtcacaatcacaccttcaaaaaatccacggatgagattatcaatccctcacatgttctggttctaggtatgagagtcaacatgtcttgtatgttgtgtgaagtacatgagtcataatctcaactgtgaactggatctgtgcagcagcttctcaatgttttctgggcattgtgtccccttagataagtcgcagcctgacacgtgtgctaaattatggtttgagggtcaacaaatccatgcataacaaaaatccatgtatgagagtcaacattgcaacttttgactgcctctagatataagattcaaaacctcaacagtgggccatgctcatgtgagaggacaacaatctttacgcttgactgtgtctgcttactagtgttacaatctcacctttgagctgggctctgttagtacactctctgtaccacccaaagaatttatgagatacatggtttggctctatgtcctcacccaaatctcacctacaattgtaatctccacgtgtcaaggcaggaaggtaattggatcatgggacagtttctcccatactgttttcgtgatagtgagtgagttctcaggagatctgatggttttataactgttggaagttcctcctttattcactttctccctcctgccacctcgtgaagaaggtccctgcttccccttctgccatgattataaatttcctgaggtctccccagctatgtggaactgtgagtcaattaaatcccttttctacctaaattacctggtcttgggcagttctttatagcagtgtgaaaatgaactaatacaatatgatatgcatgagaattgcaatctgcattaagaccttcatgctgatatgagcccatgattgtacgtgtcactctaagctcagatatgagagtcaacacctccccagttggctgtgcctaaatagaagagtactcatttgcctatgagctgggtttagaaatgggtcactatcacatatgtgtccagatgttcacatatgactgacacaattccatctgtagactgtgtctatgtgtgagattcaggatctcaccagtgggttgtgtccatgtgtgaggatgactattttaaggattggcagggtgtgcataccagaaacatagtatctcttgtgtccgtggacctgtgatgacactctctgtaccacttgagggctttatgcaatatgcaagagcgtggtgaacctctgtgacccttgtacaaagaggacacccaggatcttaccttttatcctgtgcctagctataagagacagtatctctctcattggctagttcaaggtatgagagtcatcatcacatctgtgagctgggccaagatatatgtcacagtcactcttctggattgggagtaagcaggagagtaacattacctgggtttggggccagatgtatgtcacaatcttctgtgagggctcagcaatatgtcacaatgatctacgtattcaagactcagtcaaaaagactcacaaccttgtcgcggggtccagtgatgtgtcataatcttttctgttaggagggtgcaggcagaaaagaagagtcacatttcctaggtagtgtatgcagatatatgtcacaaggcccactgggcagggcccaggcaggagcctcttattttctaggtgttggatccagtgttatttcacaatacaccaaatatgtggggcctgggagaaaggagagtcacatcacataggtgctgggccaaaagatatgttataataaccctctttagcagagcccaggcagaaaaataaatgtgtcacatcacccaggtgataaacaaaaaggtatggcataatacccctatgggcagggctcatgcagaagagttgcaccacatagttgttaagataggccatacgtcacaatacacaatttatgctgagctcaggcaggagaaaagagtaacattacctatgtgctaggctcagcgatacatcacaatacctccttggtcagagcccaagaagtagaagagagttacctcacctaggtgctgagtccatcaatatgtcacagtactcattgagtgaagggcccaagaatgaggattgcatcatttcggtgaggggcccagagctatgtacccatactccctgtaggtagggcttaagaaaaaaggagagagtcacataacctgtcacataacctagacagatgagcccagccctatgtcaaaattacaacagtggtcagagtccagacatgagaggagaatcacaacacttaaatgttgggtgaaggaacatgtcacaatcccaactggggacagaagcagaaaaataaggagaattacaccatctaggtaatgggcccagagatacattgcagtgacccctgtgggcaatgaccaggcagtagaatcacatcacctgtgtgatgggcctggggataattcactctaccttctgtgagcatagcactggcaaacgaggagagtcacaacacctaggtgctggaatcagagacacgtcacaatctcttctaatggcaaagtccaagtaagcgagaagagtcacatcaaatagttcatgaacttagagatatgtcacaatgccccctgtgggcagggtccaggcaagagactcacatcatctaggtgctgagcccagcaatatgtcacaaagctttctgaggtcaggagcaaggcaaaaatgtaacatcaccttactattgggtccagagacacatcacaacctttcctgcaggcagaacctaaaaagaatagaaaagtcacatcaactcaatgctgggcccagtgataggtcacaatattccccgtgagcagatatcaggcagaagtgagtcacatcacctggctaattggtgcagagatgtcacaatgcttcctgtaggcagggccaagtcaagagagtaacatcacctgggtaattggtgcagagatgtcacaatgcttcctgtaggcagggccaagtcaagagagttacatcacctgggttctggacccagcaatatatgacaatgggccatgtgggaagagtataggcaggagaatcacataacttgggtgtggagcccaatgtcacaatgccttctgtgcagggtgacaaaacagaagggtagactcacattaactgaatataaagcctagtgatagtgatatgtcacaatgctgtctgtgggaagtgccaaggcagtggactagagtcccatcgtgaaggtgctgggtttagcaatatgtcaaaattccatctgtgggttgggccaaggcagaagtgtcaaatcacttagttgctggacagaggcataagtcacacagtctcacacgcagaaagatacaggtacaaagttaaaattcttgcatatgacctaattctaagtatgggaatcaatatctcctttattttgggcctaagtcatgagtcttaatggtggactaggtctgtgcgtgggagcctcgctttcttctgtgcactatgcctccttagtagagtcacagcctcacaggtgtgctgaatcctggtctgagagtcaccagcccatctgtggactggatccccatataagagtcactttttcaagtttcaactgcatctaaatgtgacactcagaacctcaaaagttggccatgttcatgtggcagtatgacaatctttattgtcaactggatgtgcatacaagtgtcaaaatatcacctgtgctgtgccttgtcaggaaacactttgtagcccctgagggctttatgcatgagagtctcaatatgctctgagacctccctgctggtctcaaagttctggtatggacccatggttataatttttaccctaatctcttgtctcagattcaccttctcttcagttggctcagtccaaatagaagtgtcctcacctacctatgaactaggtttagaaatgagtcaccatcccaactgtagcatatgacagaaacaattccagctgtggactgtatcaacctgtgtgattcaggacctcacctgtgggctctgtcgacgtgtaagagtgaaaatcctaatggatgttagggtgagaatataagaaacacaatctcatttgaatgctgggctctgtggtagcattttgttccttgctagggctttatacaatgtgtaagaaagtagtgattttctataaccttcatacaaagaggagacatgggatcttacccatttctctaatcccagctaaaacagatagtatcttttctgttggctggtgtgtggtaatagagtcatcattgcaactgttagctggaccaagatatatgtccctacctgtgggtagggagcaaacaggagagtcacatcacctatgttttgggccaggaatatgtcacaatcttccctgacagaagtgaccaggcagaagaataatatcacctgggtacttagccaggaatatgttacaatcacaatcccctcctgaaagctgggtgcaggatgcaggctgcagaaccacatcaccttggtaattgggctcagcgatgtgtcaaaatgctttctgtgggcaaagcccaattaggagagactcatcatctgtttgctgaggccagcaatatgtcacaattttccctgtaggcagggtgcaggcagaagaagagagccacatcgcttaggtgatgaatgcagaaatatgtcaccaggtcttctgtggacaggccccagccaggagccttccattttctaggtattgggcccagcaatatgtcacaatacccaaaacatgtggggaccagaagaaaaaaaaaaaaaaaaaaagagacatcacctagatgatggatcaagtgatatgtcacaatcttcttatttggcaggtctcaggcaataaaaatgtgtgtcatatctcctaggtgatgaaaaaacagtatcttataatacccctgtcttcacggctcatggggaagagtcacatcacctacttgttgggtgcagccatatattacaatatgcaatgtatgccgggcccaggcaggagaggaaagtaacatcccctaagtcctgtgcccagggatacatcacaatgcctccttgagcagagcccaagaagtagacaagagtcacattacttaggtgccaggtacaacaatttgccacaatacttcctgagagaaaggcctaggcagaggtctcacaacactttggtgagggaacaagaaatatgtaacaatgtccctggtaagtagagctagaaaaaaagataagcatcacagaacatagggccagtgcccacttatctgtcacaatcacaccagtgggcagggctcaggcaagagtagagagtaatataatgtaggtgctacagcaagcaatatttcacaattttcagtgtgggcaggtcccagaaagaaaatgagtatcacatcacctaggtcatgggcccagagatatgtcgcagtggcccttgtaggcaataatcagccagaagaatggcattgcatgtgtgctgggcctagtgataattcattattccttctgggggcctggcacaggcaaaagcagagagtcacaacacctagctatttggcccagagatatgtcactatttcttctatgggcaaagtccaggtaaaataacagtcacatcaaataattgatgcaaccagagatttgttataatgccttctgttggcagggcccatgcaagagagtcacatcacctaggtgttggacccagccatatgtcacaatacacgacgtattcagggctcaggcaagagatgatagtcacaccatttagatcttgaatccattgaaacattacaattttatattgagcaaaagctaagcagtctagaagagtcacatagcctaggctttaagtccagcaataccttgcaataacccctgagaggagggcccaggtaaaagggtaactttatttaggtgagaggcctagaaataagtcacaattatctgtgtgggtaaagatcagaacgaagagggaagttacataaagtaatagatgtgctgatatgtatgtcacaatcactctaatgggaagagctaaaacatgagaggagagtcacaccacaaaggtgctgcatattttgcaatacagaatgtatgcagagcccagaaaggagaggacagtcacatcacctaggtgctgtgcccagcaatacattacaatctcttcttggacacaacccaagcagtagaggtaatccttgctgctggacccaaaaatatggcacaatataccctgaaaaaagggcccaggtagcagtgtcacatcacctggggagggtttcagaaatatgtcaaaatgcctcctgtgggtaaggctcaggaagaaaagaagagaaaaataacctaggggctggggccagccatatgttaaaacaacctcagtgagcagggcccaggcatgagaggagggtcacataacatagatgatgtgccaagtgatatgccacaactcatactgtggacaggtctctgcaataaaggagagtcacataatctggctgacggtcacagagatacatcacaatgtatttatctcttgtccttacggacaggaatcaggcagaagaatcacatctcctctgggctgtgtcctgggataatttactctcccttctgtgatctgagcccagggagaaaaggagactcacattacctaggtgttggggccagaggtatgtcacaatgtcacctgttggcaaatatgaagtaagagaggggagtaacatcaaatagatgatgggtccagaaatatgtcacaattccccttgtaggcagaatctgggcaggagatacacatcacctgggttttagtcctagaaatacataactagatgcaatgtgggcaatgccaaggcagaagaataaaaaacacataccctaggtgttaggtgcagaaatatgtcacaatttcatgtgacattcctggacctaacacctagggtatatgtctttatggtgacatcctcactcaggtgcttggaagaagtgtatgtcacaatcagagctgcaggtaagttcaaggataagattaaaactcccacacatatccttcttctgggtatgagagcaaacacctgctgtatgttgggtctgagtacaaaattcacagtatcaacaatggactgaatctgtgcatgagaacttccgtcccttctgtgcactgtgtcttatttgtggaataatagctttacaggtgagttgaatcttagtctgatattcaccaacccacctgtgaattacttcgaagtatgagactcaattatctgacttttaacttcctcctaatgtgagattcagaacctaagcagtaagctgaattcatgtgcaataatgaaaatctttactatgagctttgtgtgcataagagtgtcacaatctcacctgggccagagatacattacaatctcctcctgaaagcaggaaatgggcagcaaagtcgcctcacctggatgccgagcccagcagtaaatcacagcattctctggactcagcttttggttcaggaacatgaaagagaggcacatcacctggtttctgggtgcagtgatgtgtcacaatctgttgccctcagagaagaagatgaacagaaaaggagtcacatcagctaggtgctgggttagtcacaggtcacaatcacccctgtaagcaggaaccaggccgaagtgagtcccaaaaatgtcccctgtgggcagcgccaaggcaggataataaagccacatcacctaggtgctgggtcgagcgataactcacaatcctgtatttgggctgggccccggctacaaagtcaaatcactcagttgctggccagagggatatatcacatttacacctgttggaatgtcagagaatgatatctacaatccagcacatatcctgtttctgagtatgtgagttaacacctcatgtatgttgggtcttagtacatgagttcatctcaacaataaactggatcagtgcataagaggcacaatccttccagtgcactgttttatctgagtgagttacagcctcaaaggtgtgccgaatattggtcttagagtcatcaacctacctgtggacaagattcacctatgagaatcaattttccaacatttgactgcttttggttgtgaaatccagagccttaacaatgggctgtgttcatgtgggaagatgacaatctttttctgtcgacttggtgagtgtcacaatcttgcctgtgtattgccctagggctttatacttgatgtatgagattctcaatctgctctgagacatttgtgctggtatgaatcatgatcattcctatggccttaagcccaagtatgagaatcaacatctctccagttagctgagtccagaatgaagaatcttcaccttcctatgagctgagcttaaaatgagacaccatcccaactgtgcttacatgtttatatatgatagctgcaatctcaaatgtagactgtgtccacctgtaagattcaggatctcaataatgagctttgttcaattgagaaaataatgagaaatacaacctcacctttgtcttgggctctgtgttgacactctctgtaccacccaggggctttctattaaatgtgagacagtagtaattctctatgaccttcatacaaaaatgagacctagggtttgaccaattttcctaagcctagctaagagagacagtatctttcatattggctggctcaagttatgagagtcattatgacacctgtaaactgaatgaagacatatgtgacaatcccacaattgggtaaggagggaatgaacaggagaatcacatcacctgggtgctgtgccagagatatttacaaccttctctgagagcagtggccaggcaagagagtcacatcatgttgttgctgggctggaattatgtcataatttgttctgagagtaaggaccaggcaagagaggcacagtacctgtgtttttagccagcgatatgttatcccctcctgaaagcaggactaaggcagcagagtcccttcacctggttgctgggcctaatgatatgtcacaatgtcttctgtgtctaggtccaatcagcaaatgcacatttcctactgctggctccagtgatgcttcacaattctttttattgggatggcccaagcagaagaggaaatctgaaacacctaggggatgaacaaaaagtcacttcccaataactctgtgggcaggacacatgcaggagagtcacatcacctagcttctgggttcagtgatatgtcacaatcccttctgtgggctgggcccaaacaaagagagtcaaatcacttgggtgctgggaagaggcacatttcacacctgcaagaaggtccaagaatgagattaaaaattccacacatgtccaaattctaggtatgagagtcaatgcttcctgtatgttgcttctatatacatgagccacaatctctacaatggactgaatccacttatgagagcctcaattttttctgtgtactgtgttcccttattagaatcacagtctcacaggtatgctagatttttgtctgagagaaaccaatcaatctgtggacaagatccacttatgagagtcaattttccaacttttgactgtctccaggtatgagattcagaagctcaacagtgggctgtgaaaggatgatcatctttactgtttgctgtgtgtgtgtaagagtgtcacaatcttacatttgtttagggccatgttaagacatgttctgtatcacccaagggctttatatggtatgcatgggagtcacaacttcctctaaatcctttgtgctgttatggacccatgatagtgtctgtagctttaagcccaggtgtgacagtcaacatctttctaattggttgtgtccagataggagagttttcacctgccagagctgggtttagaaatgagtcaccatcacaactccgaacagaaattcacaaataaatgtcacaattttaactgcagactgcatccatgtgtgagattaagtgcctcaccagtgggctttgtccatgtgtgagggtgacaatcataatggttgtcagggtgagcacacaagaaacacaatctcatctgcatgctggaccttgtgatgacactctctctaccacccaaggactttatacaatatgtgagagagtggtaaccttttataacctttgtacagaaaggaaacccaggatcttacccatttttctacacctagctatgacagacagtatttgtccccttggctggttcaaaatattagtcattatcacacctgtgcactggccaatacatatgtcaaaatactacctgtgtgtagggagcaaacagaagagtcacatcacctaagtgctgagccagggatatgtgccaatcttttctgaaagaaggggccaggcaagagagatgtatcacctgggttctcagccagggatatgttacaattccccactgaaagcagggcacagacaacagcaacacatcacttggattcagggctcagtgttatgtcacactgtgacctttgggtaatacccaggcgtgaaagacacaacacctggtttctgggttccacgatatgtagcaatctttcctacaaacaacatgaaagcagaggaggagagtcaaatcccttaggtggtgagtgcagtatgtcataaggcctctggtgggcatagctcaggcaggagtctctcatccagtataagttgggatcagtattaagtcacaatattcaacatatgcagggcccaggcaaaacagaagagttacattacctaggtgctcaatccagtgatatgttacaataaccttatttttttcttttctttcttcttcttcttttttttttttttttttttttggcagggcccaggcagaagagaagagtcatatcatctaggtgatgaataaaaaggtaagtcattattcctctgtgggcagtgcttgtgcagaaaatttcaccttgtaggtataggactcagcaatatatcacaatgtctgcagcgctttggaaggagaggagagtcacatcacttaggtgctaggcccagcaatacatctcaatcacttctttggcaaagctcaagcagtaaaaaagagtcacatcacataagttctgggtataacaatatgtcaaaatacccccgagaagagggcccaggaaagagagtcactttggtgagaatatcagagatatgggacaattccgtttttgggtattcacaaaaaaagaacgtcccataacctagaagctgggctcagctctatgacacaatcaccctagtaggcaggtccattaaagagaagactgccacatcacataagtactgggcagtgatatgtcataatccccatgctgatagacccagagacatctcacaataacctctttaggcagagatcaggcagaagaattacatcatttgtgtgttgcacctagtgataagccattactctcatttctgtggacatggcccaggcagaagcgcagagtcacattacctaggtgctgggccaagagatatgtcacaatcttttacataagcaaaaccaaggtaaaagggaagagtaacatcagatagtaggtgttaccagagacatgtcacaatgccccctgtatgagagaatcaagcagtaaaaacacatcactacattgcttaatctagtgacatgttaaaatctttcctgtgggcatgatgcaggcagaagatgagagtcatatctcctatgtgattgatgcagagatatgtcacaaggtctcctgtggacagggtcgagactgaagccttccatccactagggtttgggtccagtgatatgttacaatacccaaattatgcagggcccaggcaaaaaaagagagtcacatcacctaggtactgggtccaatgatatatcacaattttctattttggcagggcccaggcagaaagaaaagttacattaccaaggtaatgaataaaaatacatgtcataatagttttgtggacatgatccatgcaagagagtcacatcacctaggtgttggacccagaaatatgtcacaatatacaatgtatactgtatgcctctcagggctgaggcaagagatgatagtaacttcacttatttgttgagcccagctatacaatcattttttgggcaaagcccaagtagtagaggagagtcacatcacttcggtgctgggtccagcaagttgtcacaatacctgctgaggggagggtacaggcaagagagccatgtcacttaggtgaggggcccagagatatctcacaatacccctgtaggtagaactcaggaaaaagaagagagtcacataatctaaaagctgggcctcgctgtatgttacaatcagccagtggacaggtcccaagcatgagagtagagtcacatcacataggtgctgggccaagcaatttgccacaaccttcactgtggacaggtcccaggaaaaagaagagtcacatcatttaggtaacaaaacctgagttatgtcacagttacttgtttgggcagaggtcagaaagaagtatcacacaacctgtgtgctggactaagcaacacgtcactctctcttttttaggcatggcccagggaggagagaagattcatatcacctaagatctggattcatggataggtcccaatttcttttttgggcaatgatcaggtaagagagcagagtcacatcaagtggttgatgggcctggagatatatgacattgccccctatggacagggaccaggcaggagactcacatcaccttggtggtaggacgagcaatatatcacaacacgttttgagagcagagccaaaagaggaacaccatcttggtgttgactgcagcaatatcttacacttttttgtgtgtgggcagaacctataaagaagggaaaggttggccaggcaccgtggctcatgcctataattctaacacttagggaggccgaggtggacagatcacctgaggtcaagagtttaagaccagcctggccaacatggggaaaacctgtctctactaaaaatacaaaaattagctgggtgtcctggtgggtgcatgtaatcccagctactcgggaggctgaggaaggagaatcacctgaacctgtgaggcagaggctgcagtgacctgagattgcaccactgcactctagcctgggttacagtgtgagactccatctcaaaaggaaaaaaaaaaaagaaaaagaaaaatcacataagctaggcgctgggcccagttatatgttatagtcacccctttgagaagggaacactcaagagaagagactcacatcacctctgtggtggacacagagatacttcaccatgctctctgtaggcagggccagaacacaagagttacataactgcggtgttagaccaagcaacatgtcacaatggctgatatgggccagacacagtcaggagagtcacataacctgggtgtgggactcagttatatgtcaaaatgcccactgggcagcgacaaagcaggagaggagattcacatcacctggatgtaaggcccagtgatgttacaattcccctgttagcagtgataaagcatcacctaggggctgagtccagtgatgtgtcacaattccatctgggctgggtcaggcagatgtgtcaaaaaggttctgtgaaggtgcatatgtcacagtcacaccttcaggaaggtccagtaatgaaattaacaatctcacacatgtcccggttctaggtatgagagtcaacacctgtgtgttggatccaaatagatgagtcacaatctcaacaattgacttgaaccatgtgtgagatcctagtttctagttgcattactattagtaccagtacctattaattcttccacattctacatctttgttctgtatgaatgtgcatacaaatatcgatacatatacaaggttatatgagtatttctatgtaaatacgtacacaaaaattgtacctcaaaaaacatttttcaatcttttagcatattctaagggtgcagatatagaattatttcccttctctagctcagtagcatgtcagaatgggacatagctatacaatgttatttgtatagacaaacaaaacttcactttcgggcaagttctgaaaaataagctgatagtaaaaccatgtaacactttctgtccaggttagcatttctggaccttgtttttcttctcagagtatgcatgagctattctcatccactactggtggcccgtcttgattaaatctatagttgctatttagagaactggctgactgaatccacctgggctcatctgagtgactgactgaaatcacctggcctgaaattattggtcaattaaaatcatctgggctcaaatagttgctgactggagctaaattgaaatcacctggacttaactaattgcctgattttaatctcctgggatcagctaattgactgtaattacctggtttgagttaattggctgattgaaatcaaaagtgctgacctaattggctgattaaaatcacctggaatgaggtaattgactgactgaatttacctgatctgagcaaattggctgattagaatgacctagaccaagctaattggctaattgggataaactgggctaagctgattggctgatagaaatcatcagggctgagtaaatgggctgattgtattcacctgccctgagaataagtagggaaatgacctctgactttgaagttttttttacaagacatactcataaatggacattacatagacatatttatatatctgtatgtgtttgcatatgcttatctatctacatatacctgttaataaatattcaagttaaagtgtgcaaagaaatctgaaatttgctttcaatattgcagtctatcttgaatttacagaccttggcttttctacccatattcaataagtcacttcttcagccaaccaaaccaattacagaattgtgttccaatgtcacaagttcaaaaacaaagagctcctgaaaagatgtaagctttaaatggaattagcattttcaatttttgtttgggcctttaatttaaagctagtttatctctgttcctgtgttaatcagaatgaaaagaaatatttttgacttggcattgaataacacttgtggttttattaaatttcttgcttacagattggagcaacaaaaatttttttcttttttttttttttttttttttttttacagagtttcactctgttgctcaggcatgagtgcagtggcaggatctcggctcactgcaacctctgacatctgggttcaagtgattcttttgcctcagtctactgagtagctgggattacaggtgcccaccaacatgcccagctaatttttgtatttttagtagagatggggttttaccatgttgaccaggctggtctcaaactcctgacctcaaatgattcacttgtcttggcctcccaaagtgtgttgtgagccaccatacccagccaaaaaatactttctttaaacatgttaaatgcagctaaattcacatcagagtattcttccatttgtgtactcttgtggatatactttagcgaacaaataagattttacatgtatggaaatttatttttatataactatcagtaaaaatacctatcaatgctttgaaattctatatctttattctgtataaatattgaaataatgatagatagacctggatagaaatacactgtcatgctcagggtcaggttacatccccagctgagagccaaggggagtgggtggatgtggggcagggagctggaggaacacttgagagacagcaggtaaatgagacatggctttattcagcagccccttcacagggtcagtgttacatttatacactacacaaacaatagtggctgagtgccaggtggtgagcttctctatgttatgtctacatgaatatgctttattcagcagccctttcacagggtcagtgttacatttatacactacacaaacaatagtggctgagtgccaggtggtgagcttatctatgttatgtctacatggctgtggttatacaaagctgtgcacctgtgccacaaacctgctgagtcatccagactgtttacctcagcctatgtctgctgccctatgcctgcttggttgcagcaaagccattttctttacatatacatgagtagataaataaacatatacgtacaagattatataagtttatctatgtaaataattgtatatgcaaaaaatgttcatcaggagacattgtcaattccccagcctatcttagaaacacagatgaagactttacttctcacctatatagctccataccatctcagactgagagacagccatacatatatacatcaacaaagcttcacacttcagggcatggcctggatataagcttccagtactgccacatgaagctttatgtgcatcttaacatttcagggccctactttctttctgtttgtatttctgtgttattcacatgtgccatctttgttctcccttgatgcctctgcttcctaatttaactagttgtctgattatatccacctgagctgtgctaagggaactagtgaatgaagatatgctagtgaatgaagatgacttctgatctagattttttctgaagtgttttactagacatatgcacaaatggacattacatagccatacccatggggtccacactgtgtttatatatatgtacatttcccccacctacttgatatgaaggtatatgtgtgcagaaaaataacacaaagtaagcatggtcagaggttatattaatttttttcaggccatttgaatgcaatcagccaattagttcagtgatgatttattcaattcaagctacacaccagctgatattttaaaaataaatgtgaaaatgtgttttgttatctggaacacggaggtttttctttctgggtctcgttaagttagcccaaagtggctctgtacattcaggtagaaacatctagaaatgctcaacaccagtcacctagctttcctcaaaaagaagcttttgccgagccagtaagaattacctttgtcatttcagtgaatgttcactctatcctggttaaaatgtggccaggtactatgtaccattatatttgctttcagtttcacaatctatcttctaaaaagtaacctaaactttctctctcttaccacaaaaaccctatttcagcctcagagatgataagataagagtgtacttttacatcgtgcacgcattgggaaaataataaacagcccctgtcttgactgaggccataatgagaaataataagtatactcaaattaaggtgaggacctttggactggggctggttcatctctgtccctatgtacaagataaaggaaaaggtcaaactgaaaatgggaatgaatgacattttcatctctcagaagtgagcaacaaagaccaatgttttctttgtaaatgataaatatagcagaatgtttgcaaggctgtatctttatttgtgtactcttgtagatatactttatagggcaaagagtttatacttgtatgtaagtttcttcttctgctactgttagtatcaatacctatcaatactttcactttctataaatttattctatatcaatatagatacaaagattaatatatctgtatacagatatacataggcagatataaaaacactcacagaattatatgtctatgtaattatttatatttacaaaaaattgctgggcacggtggccaacgcttgtaatcccagcactttgggaggcaaatgcgggcagatcacgaggtcaggaattcaagaccagcctggccaacatagtgaaaaaaaatacaaaaaaattagctgggcgcagtgacgagcacctgtaatcccagctacttgagaggctgaggcagaagagttgcttgaacctgggattcagaggttgcagtgagccgagatcacaccactgcactccagcctggttgacagagtaagacttcgtctcagaaagaaaaaaaaatgtactccaaaagacattttcaatcccatagcatattataagaatgcatatgtagaattacttctcttctctttggctcagtagcatgccagaatggaacatagctatacaatgtttttgtataaacataagcaatgcttcacctttagggaaaagaaccgggaagtaagctgacaggaaacccatgtaatactttctgtccacattagcacttaagaacacttattttcttcttgttttatgcatgcatcattcacatctaccttcctgggcttgcctggatgaatacttagtcatcacttacataattggctgattgaatccacatgaactaaacaaataggctaattgaaatcatgtgagctgagctaattggctggctggaatcaccttggctgagctagtttactggttggaaatacatgggctgagccaatttgctgattgcattcacctttcctgagggggctgtgtaggaccgatttacttatattttgggactggtttactcatatgtgattcagctttattatattttgggacctttttttataagatgaactcatagatagatatcacatagacatatttatatgacccagtgtgtttgaatatatttatctacatatcttatatctgtatataaatctacagaaaaaagcattaaaagaaagttgtaatatgattccagtatcacagtctatctttggcttttcaactcctacctaaaatcatgtctctagccaacaaaaccaaaagacaagatggtattcccttttcgcttaaaacaacaacaacaacaacaacaacaaatagtgcccctgaaatactggaagctttaaaaagaattattcagcattttcaatttgagtgaggatctttaagctgaggctagataatctctggctttgtgctcaccagaattaaaagggtcatctttggcttggcaataaatgactcccatatcatataaagcccctgagtgttacagatagtgttatcacagggaacaatatgcaggtgagattgtgtttctcatatgcacaccccaccaaacattagaattgccaccctcactcatggaaagagctcactgttgaggtccagaatttcacatgcaaatacagtccacagttggaattttgactgtaatatgtaaagacctagccacagttggattagtgacatatttctaagcccagataagaggcaggtgaggactccagtatctggacccagccaatttaagagatgttgactctcatacctgggcttggggcagcaggtatggtcatgggtccatacaagcatgaaggactcagagttaattgtgattgccattcatattgtataaagtcctttggtattatagacagtgtagaaatagaaaagaacaacaacagataaaacaatagcaagtcactccaagtattgtgggaacaaacgaaattcaggttagaaaaaaaaaacaggaagaaggtctgagtagtgccaggtactcaggaggccgagatgggaagagcacctgggagagaccagggaggtcaaggccacagtgaatcatgattgcatccttctcctggacctgaacggtactgctgccagtgagatttatctggttgaccttagacatggcaaggcgagacccatctggttgaccttagacatggcaagctggcagctaagtccaatgctttcagccaacatctgtctcaaattaaaaagccaacagtaaatatataacaataacaaagatataataattaaaaaccaatacataaataagtgggagtgaacaatagtaaaaggtaattaatatcacaattaaggtctctctctctttctctctctgtttgtcacacccaggcttgagtgtgaaaaaatataaaccaaaatgtcaacttcagcatgcaggaaggagcataggagaatagagagaaaaaagaacaaagaagaaaaataacagcaagtcatcctaagtattgtagaaacaaactgaaattgtagttagagaaaaaaaaagaaagagagaaaagtaaggttctatctgtcgcacggactcgagaggccgagatgggaagaccaccaggcaagacaggggagattgatgccacaatgaatcacgatcgcatttctcttctgagcctgaactgtactgctgctggtgagagccatctggtcgaccttagacatggaaaggcgagagccatctggttgaacgtagacatgacaagctggcggctaagtccaacgcttgtagccgacatctgtcccaaaataaataaatttttaaaatgagtaaatatataacagtaacaaataaataataacgaacaatattaaagaccagtacataaataagtgggagtgaacaatggtaaaaggtaattaatatcacaattaagatctccttcctctctccatttgtcacacccaggctggagagtgacaaaaaataaaccaaaaagtcaacttcagtgtgcaggaaggagcataggagaatagagaaagaaaagaacaaagaagaaaatcaacggcaagtaactctaagttttgagaaaacaacctaaaattagggttaggaaaaaaaaaaaaaagcagaggaagaaggaccctgtcatcccagctacgtgggaggctgagatgggaagacaacctgtgcgagaccaaggagatagaggccgaagtgaatgatgatcgcgtccttctgctggatctgaatagtactgccgccagcgatagccatctggtagacctaagatatgggcagacgagagccatctggacgactttagacatggcaaggcgagagcgatctggtcgatcttcgacataggaaggtgagagctattttgttgattttagacatgagaaggtgagagccatctggtagaccttagacatggcaaactagcagataagcccaacgcttctggccgatatccatcttaaaataaatttaaaaaccaacagtaaatatataacaataacgaagaataaaaacaatattaaagaccaatacataaaaaagtgaaagtgaacaatggtgaaaggtaattaatgtcaaaattaagatctcctcactctgtctctctttctctctctctccctccttgtttctctctctcttggtttgtcacaccaaggctggattgtgacaaaaataaatcaaaaggtcactgtgcaggaaggaacataaagaaacagagaaagaaaataacaaagaagaaaaacaacagcaagtcactctaaatattgtggaaacaaactgaaattgaggttagaaaaacaacacaggaaggtccaagtagtcccaggtacttgggaagccggagatgggaagaccacctgagggagactggggagattgaggatccagtgaatcacgattgcatccctctcctggacataaatggtactgccactagtgagatccgtctggtcaaccttaggcgtgggaaggcgagagccatctgatcgaccttagacctggcaagctggcggctaattccaatgcttgcagccaacttgtgtctcaaaataaatttttaaaaccaccagtaaatatagaacaataacaaataataacaatattaaagaccaatacataaataagcgggcgtgaacaataatgaaagataatatcacaattaagatctctctctctcctccgtttgtcacactcaggctggagtgtgaccaaaaataaatgaaaacgtcaacgtcagcatgcaagaaggagcataggagaagagagagagaaaagaacaacgaagaaaaacaaaagcaaatcacgctaaatattgtggaaacaaactgaaattggggttagaaaaacaacacaggaagaaagttcatgtattctcaggtacttgggtggcccaattggaaagatcacccaggtgcgaccagggagattgaggccgcagtgaatcacaatcacatctttctgctggacctgaatgatactgccgccagccagagccatctggacggccttagacgtgggaaggcgagaaccatccgttcgacttcagacatagcaaggcgatagccatctggtcgaccttagacatgggaaggtgagagccatctggtcgaccttagatattggaaggtgagagccatctggttgaccttaggcatggcaagctgtggactcattccaatgcttctggctgagatgggaagatcacctggatgagactgggaagatcgaggctgcagtgaatcacaatcccatctctctgttggacttgaacagcactgccgccggtgcgagccatctggtcgaccttagacatgaaaaagcaagagccatttgtcatgtctccacctcagacattacaaggtgagagccatcttgtcaaccttagacatggcaaggcgaaagccctctggtcgacctcagccatggcaagaggagagccatctagtcgacttcagacatggcaaggcaagagccatgtggtcaacctcagacatgaaaaggcaagagccatctggtcgacctgagacatgacaaggtgaaagccatctggtcgatctcagatatggaaaagtgagagccatctggtcgaccttagacataccgaagcaaatgccctgtggtagactgtagacatggcaaagcgagaactgtctgggcaatttcagacatggccaggctagagccttcttgtggaccacagacatggcaagaggagaactgtctggtcgacctgagacatgaaaagatgaaagccatctggtcgaactcagacatggcagagtggcatctggttgacctcagacacagcaaagcaagagtgatcttgtcgacctcaaacatggcatggtgagagccatcttggccaccttagacacggcaaggtgagagccatcatgtcaacctcaaacatgggaacacaaaagccatttggctgaccttagacatggcaaggcaagagccatctggtcgacctaagacagggcagggcgagggccatctggcccacctcagaaatggcaaggtgagagccatctggacatgtgacatggcaaggcaagaactatctcgttgacctcagacatggcaaggcaagagccatcaggaagccctcaaacatggcaaggtgaaagccatctcatcgtccttagggatggcatggtgagagctatcttgtccactcacacatggcaaggtgagagccatcttgttgacctcacacgtggcaaggtgagagccatctggttgaccttagacatggcaaggcgaaagtcatctggtccaccttagacagggaagggtgagaaccatcttgtccacctagacatggcaaggcaagagccatctggtcgacttcaatcatggaagctgagggccatctggtcaaccccaaaaataggaaggcaagtccagctagtcaatcttagaaattgcaaggtgagagttatctggtggaacttagacatggcaagctggtggctatttcagtgcttgaggctgacatctgtatcaaaataaatttaaaaatcaactatatatataatatcaaacaatattaaaacccaaataaggtgggagtgaacaataataaaaggtaattaatatcacaattaagaactcctctctctgtgtgtgtctttctctctctctctttttgtttgtgacaccaaacggaagggtgaagtgtgacaaaaaataaaacatgacatgggaaggtgagcaccatctaatctaccttacatatggcaaagtgagagccatgtggtggacctcagatatggcaaggtgagagccatctggccgaacttagtcatggcaagctggtggctaaatccaaggcttgtggctgacaactgtatcaaaaaaaaaaaccaaaagtaagtatatcacaatatcaaacaaataacaacaatcttaaagatgaaataattaagctgaagttaacaataataaaaggtatttaataccacaattgagaactcctatctctctctctctcactgtgtgtgtgtgtgtgtctgtttgtcacaaccagtgtgaactgtgacaaaaaataaaccaaaggtcaacttcagtgtgtaggaaggagcatacaagaatagagagagaaaagaacaatgaaaaattacagcaagttactctaagtatcgtggaaacaaactgaaattgtggttagaaaaaatacagaggaataagttcccagtagtcccaggtacttgtgaggccgagatgggaagacccttgtttaaaagactgttgtataaaactaacctgtctcatgacgttctaaaccaagctcaggttccctgctattgggtgaaccatccaacgcttggtgaattctgtttcacaataggaagatccaacaccaaaggatcaaaaagcgatgtcgctatgaactcttggccactgcaaggcagttatcccttgtccacctcagacatggcaaagcaagagccgtctggtcgacttcaatcatagcagctgagggccatctggtcaaccatctggtatcttctctgacacgtcttgcttaaaacccaaccaaaacgtcaaaaggatcatgaggccctgctttcccggtctgtattcatactgaaaatcaagatcaagcaacttctgcccttctgctccacaggaggttttggtactccctgcactcaccttcagacacctgcattactgtttgacaggtgtaccgcaccagtccgactctgcacttggcactattccaggaccagttaacatccagccagcatgtggccaggtgcttggcgccaaaagtgagccccttttggctttcctccccagccccaacttcaccaggtcagtgaaaaaatgatcagggtagtggaatttcaccggcagcccacaaggccagtggacctcaccccatctcctcagagaaacagaggggtgctggggcctttcacttattctacacctctcatgtctcttcaccataccagactagagtcagtctcaacagagtctttgttccctgctgattctgtcaagcccattcctttggctgtggtttcactggatagcaggtaggaacagtgggaatcttgtccatccattcatatgagtcactaattagatgatgaggcatttggctacacttaagagagacatatttactcctgccatttactcgtgcttcattgaatttcttcattttgacattcagagcactgggtagaattcacgttgtgtcaacacccaccataggccttcaccatgctttgttttaaaaagtcagattcccctggtctgcatcagttctaagaaggctgctaggaagtggcaatagcaaggtgggcagggatagggaagaggaaggtatggcaaggtgggtggaggatgtctgcagaggggtgccgctagcgttgaggggtggagtacagcacctcatccagccactgcctgcacccagccccatttcaagccccagccagactggcaaagcccttagagcaaattcttaccctgaacttactgatccagcttgctgatttcccttacctacattgttctaacatgccagaggctgtttaccttggagacctgctgtggatatggttacagcctggtgtgagatttacaccctctcccccagattttcaagggcctgtgagagctcaccaggtgcctcctgatctatgattctttccaaggcacagacctctctctaagggtgaatccactacagggtgccctgctcttcacaaaaagaactctcccctgggctcccaccagcttctccaggatcacttccattacctccctgaatgcctcatggtgcccatctctgccactccggattcagaaatctgaacttgactccgtttccattggctgagggcaatggaagtcatcatccatcccttcggaatggcactctcctatctctggggaccgagtgacccatcttcaactggaacccttctccacttcggccttcaaagttctcatttgaatatttgctactaccaccaagatctgcacctgggacagctccacccaggctcatgcccaaggcttcaaggctcattgcagcggtcctcccactcatagcagcatagcatcctcggggctccagcgggagcgaccaccctcaccactcccatccactctcaactgctggcaatggccgggtatgggcccaatgtttcagtaccatccatttttcagggcgagttgattctttgttgttaaacactccttagtggattctgacttccatgcccaccgtcctgctgtctatatcaaccaacacattttctggggtctaatgggcatcagcatcaggcaccctaacatggcatttggttcatcccacagcagcagttctgcttaccaaaagttgcccgctaggcactcgcatttcatacctggccccatgccatcgagctgggcttctaacccatttaaagtttgagaattggttgagatcattttgactccaagacccctaatcattcgctttaccaaataactgcgtggcatggggtttttgcgagagcgcccgttatccttaggaaaacttcagagggaaccagctactagatggttggattagtcttttgcccctatacccagatcagatgaccgatttgcacgtcaggaccactacagacccccaccagagtttcctctcgcttcgccctgcccaggcatagtttatcatcttttggtgcctaacacaagcgctcattctccacctgcccagcacagtgggcgagagtggacggtggtgctcccttggcaaactggagaggcctcaggatcccgcctcagccagccagcgcatcagccttcaccttcattgcgccacagtggctttcgtgcgagcccctgactcgcacacgtgttagaccctttggaccatgtttcaagatgggtcatgtgggtagccaacagcgccaccggcctcgtgcacttcttccactgttcttttgaaatgagtgcatggccgaagagtccccccagacccgacagcacaaccagcctggggcacaccacagtcagcccctgcccctcacatgcggcctactcgctgggggcagggaaggggtggtagagtagttacaccgtgggaggggtggcccagccccctagagggacgctgtcatgcccccacgggggatcccctcatggggggctcccactggggtgggagcagggaaggggagagcagggcaacaggtctcactacctcagtcccgggattctgcgagtgctactgctgagggactgtaacactcggggtgtggcccagctcacccccctccagagggatggggaggacatgaccccccgagccaccttccctgccgggcctttccagccgtcccagagccagtcacggcgcagcaccacagtggaaatgcatctggcggtggccagtcgccgtctggaggacagtccccaaggactcccccgcctgcccaacccacccacctccgcacctgctggggcccgccacctccaaggaggaggaggggtggccgaggagggagggcggttggaggggtcgggaggaacgggaggcaggaaagatccgccagaccactggcacagcccgacccgccgcctgtttgaatcttccatcagactgcatggatcccacacatttaagtcttaacggtttcacgccctcttgaactgcgtcttcaaagttcttttcaactttcccttacagtacttgttgactattgtctcttgagccagtatttaaccttagatagagtttgccaccagcttgaggttgcattcccaagcaacccgactctggaaagacccaggcgtggcagccaggggctgctaatggcctcacaccgtccacaggctggctgggcctcaatcagaaggacttgggcccccacaagtggcgttggggagtgagtcttccatacgccacatttcccgcaccctaccaaggggcagggatttggcactgggatcactgttcacctaactttactaagggcatcctggttagttccattttctccgctgactaatatgcttaaattcagcaggttgccacctctagcctgaggtcgcgtcttggaataaaggaagagacgggcgggcatggaggatgcgagcctggacactcggttgggagacaggcccagtgagggaggggggcgggggtgacagagaagagctgcggctgacggcgtccctgccgcaccagagccggatgacgggagggagaagcaagaactaggggcagggaatacacagtaccctcaccgtccagaggactgcgactgaggatgtgcttccacccccccccaatgcggaagctcaagggggccacacgggcggcacagccatgaaccagaggcaagcacacaatggcggatgctgccatggtgtcccatgagtcaccaccagggcaccgccagcacgcagcttggccttgaccccgaccgggggggtcacgcagggcagacttctggccccagaagtgcacagcaggctgggtgggagaggaggagggtgcagggaggagcagcatttggccggacaccaggctgccaccggggcgggcggtaaactgtggtgggcggtgaactgtggcgaccgggatgaaatcttgctttccacccccccaaccttccccaccccccacccgccaatgtaggacagcacaggacattttgcccaggcccaggcgaaccctggaccgcttgcagcacgagggagctctctaggggaacccggactgtggcagccacaggaactcggccccagccggctcttttccttcctctcacaggcagtgggatccctcctaaccaaggctccttcccccaccacgtggtccctcacagggtttgcatggatgaatgggaggtgggaggaaggtgctaatggaaaaggaggggggcaccacaaggcctgtacttgggaggacagaggggccaacgagccctgcaagggaaccgccagccatgcacccctgggaggccagaagcaccccttgggatgattgctcagcaagtgatgactcagacaggtgtagccctgggaggaacacggagtcacaagtgcatttgaaatgatgatcagtgtgtcctgcaactcacattaattctcacagctggctgcattcttcatcaatgcaggagtggagtgatccaccgctaagagtttcacaaagttctttggtgagggactcccaacaccgggaggccctcctggcacagcacatccccgaagggattgcctcaggtcagccaatgagacagcactgagacagaactctcagaggggttggaaggtttcaccacaggggcatgcacaccacccccacaggggtgagcacagacacccaacagttgccagggggttcccacccctgacaacgcagagcccaacatgggcagcacacacaatggcacgatggccaccaggtaagcccccactcagcagctgcaaccatggcaatgacaggagaaaaacaaacaactccattaaaaagtgagcaaaaaacatagacacttcttaaaagaaggcatgcatgtgctcaacaagcatacgaataaaagctcaacatcactgatcattagagaaatgaaaaaaacacaatgagataccatctcataccagtcagaatggatataattaaagggtgaaaaaataaattctggtgaggttgtggagaaaagggaagacttataccctgttggtgggagtgtaaattagttcagccattgtgaaaagcagttaggtgatttttcaaggagctaaaagcagaactaccatttgatagctctgctagccatcccattactgcatatatatccagagaaatgtaaattattttaccatagagacccatgcattcaaatgttcattccagcactatacaatagcaagatatggtcaacctaaatgccatcaatgacagactggataaagaaaatgttgtatatatacaccatttcctctcataatagtgatttgatccaaataaggagtcaaagtccatgaatgagtatgtggaatgaaaagccactctacaagatcttgctcttgaacaataacaccagtaggtgaatgctgagttggaaaaattagcaaatctagagtcttctctggatctattctatttatttgagccttatggacttgctttttgattagctgtaactcgacctcagcctcctttgttaattgctgagggcaagtgagactaggacctcctctaaggatggaaaatagattactcatggcataggtaggaatgtctagagcaagtcgtatccaattaatgtccctagtaatttttgaaagtcattaaatgttttcagttgatccctatgtatggttactttctgtggcacaatggtagtgtcatttactaaggtccccaagtaagagtaaagattagtagtctgaattttgtcaggagctataattaaaccagcatgagaaattgaattttgcaagtaatcataacattggaataatatttcttgagtgggggcaccacaaaatatatcatccatctgatgaataatgtaacactgaaagttttttaccagtaggttcaattgcttgccctacataagtctggcaaattgttgaactgtttaacatgccttgtggcaacactttccagtgaaaatgcctagcaggctgcaggttgtttacaacaggaatcatgaatgcaaaccattcacagtcttgctcagctaaggggatagaaaagaaagtcttttaaatctatgattattaaaggccaatttttccaaatcatagcaggagaaggcaatcctggctgcaattcccccataggttgtataactgaattaatggctcttaagtcaattaacattctccatttacctgattttttcttaattacgaaaactggagaattccaaggggaaaatgttggagctgtgtgtcctttttctaattgttcagtaattaagtcttctaaagtctccagtttctctttactcagcggccattgttctatccaaattggcttatctgttaaccattttaaaggcataggttttggaggcttaacaatggccaccatcaaaaatgatatcctaaaccttggagggaacttttcttcctgcttgaagcagttccttcaaaccttgcaaaattcttctagtcccacaccagggacataccctatttcatgcatcatatgctgactttgagggctatataattgttctggaattagaacttgtgctccccattgttgtaataaatctctcccccacaaatttataggtacagaagttataattggttgaatagtcccagattgtccatcgggcccttcactatgtaaaatatagctactttgatatacctcaagggctttaccaagtccaactatgttaaattgagtgggttgaattggccatgtggacggccagtgctttagagaaatgattgaaatgtcttctcctgtatctgccaaacctttacacttctttccctgaatagttatttcacaggtaggatgtttatcagtaatttgattcacccaataagctgctttgccttgtttatttgtgcttccaaatcctcctgttcatttaatttcacttttccccatttccacatatggcacaatcaggagctgtgttatgtgctctcctggctctgctttccagggaacagaagtagatataacaatttgaatttctccattgtaatctgaatcaatgactcctgtatgtatttgcactccttttaaattgaaactagacctacctagaagcaatcctatcctccccactgtcaagggtccacagactcctgttgggaacttttgcaagggttccccaggcagaaggctcacagcttttgtgcagcataaatctactgcagcactattggctgtggcaggggacagacaaaaattagttgggcacacacgtatagtcccagctactcgggaggctgaggcaggagaatggcatgaacccaggaggcggagcttgcagtgagtggagattgtgccactgcactccagcctgggtgacagagcgagactctgtctcaaaaaaaaaaaaaaaaaaaaaaaaaaacctaggaacaagtataagtaaaaattctttctgatgtgatctttatatgataaacctacacatgtacccttgaaccaaagataagagttaatatgaaataactccatggctggaggagaatgaaatgtaggtggaaagaccggtttgtgctacagatagtgacccaaatgggactgtactctgatttacttctgtgtccatgtaggcagatgagattatgaacaagttacctagaaacctaatctggtggagaagatgggttgctgctgcagatccagtgcttggaggtggggatatgccgggacaattgtagacacttttgtgtagtgtatagtgttttctgttaagaaacgctagaattaaaaacgctgtggtgaagtttctgagggtggtgcctagtcctgagagaggtgtgggcacatcaatgtgtagtgggtatgtttgtgagtgggtgagaatcctgtggtggcagctgtgggaaaagggggtctgtcatcagagcacgtttaagtttttagtcctctcttactctgggagaagacttgaaatcacaggacaatgggcagtgtgactgcctgtgtactagagagtggagactttcattcccagacacccagttttattcccggccaggcctccatggtatctttttttctggcatcaaatttgtagtttgctgaatgccaagcacttctacaccaactcattgtctaacatttgaattctgataccacccagagtcagcacacaccctgattcagggctcagtcccacaacattgtccttagtgcagttgccagtcacaaaccccatgggcccagctatgcctctgagctactgtttaaaaattcaggacttcctagccaggcttggtggtgtgcacctgtaatcccagctattagggaggctgaggcaggagaatcgcttgaactcgggaggtagaagtttcagtgagccaagattgtgccactgcattgcagcctgggtgacagagcaagactgtcccaaaaaacaaacaaacaaacaaacaaacaaacaaaaactaaaaaaaaatcaggactcctataaacgatctaaagttcaataatttgatagagctacccacagaactcagcaaaacactgtagttatgttgaccagtttattataaaagatacaatccaggaaaagtcaaatgaaaaatatgtgcagggcaaagaaaagaggtggcaaaagatgaagcacatagaaaatcctggtaaatagctgtgattaataaaataaaattctccatctattatgtgctccaggaaccatttatgaaaagaaacatccttcccattatgacttagatgctctttttttcacctatcacatagtcagacatagactctgcacatttccttcttgttctcatttaaaaatcagctgaatttttcttcagtggtaaaaataaaatacttctaaataaaatttcacttaagtcaggctgggtgcagtggctaacgcctctaatccaggcactctgggaggctgaggcaggtggatcacctgaggtcaggagttcaagagcagcctggccaacatggcaaaccccatctctactgaaaatacaaaaattagctgggtgtggtggcacatgcctgtaatcccagctacctgagaggctgaggcaggagaattgcttgagcctgagagatggaggttgcagtgagccaagatcacatgaccgcactcctgcctgggtcacagagtgagactccctccccacaaaacaaacaaacaaacagacaaacaaaaaaacttcacttaagtctatcaccttcctacaggctcctgaactttgagctatcctctgcctaaaccaacatacaactccattttaggtctctcctaagaacgtacgacttgagggtaaaacattctctgaaccagaatctgactttttcactctccatttgccattcccctcccaccttctttctaatcttgtttgcttctccctataaaagaaagcacttttctgcctaaactttgcaatctttaaagctttaaggattatagttggtacttcctcctgttgcaatactcttttggaacttaatttttttttacataaatctaactttgttttattttacaaagtctggcaactgtctcaaaacaagaacaaacttatcttcagtaagaccctcccagtccccttctatcgtaaccttaacagcatctgcctatggctccccagctttccagggctctgtagcttctctcactataaagttttcttctatggctggggtgagcaggctgggacacctgcaggggaggctccccagaaaaaactaactgggcctataataaactcattttgcaggctcagtattagccttaacttggagtcactgtgatcaggcttaatttccacatcagttactttcctttttttgtttttgtttttttttgttgttgttgttgtttgtttgtttgttttttaagaaagagtttggctcttgttgcccaggctggagtgcaatgacacagtctcagctcactgcaacctccgcctcctgggttcaagcgattctcctcctgcagcacctcccaattagctggaatttcaggtgcctgccaccacacccagctaatttttgtatttttagtagagacaggatttcaccatgttggtcaggctggtctcaaactcctgacctcaggtaatccgcctgcctcggcctctcaaagtgttgggattattggcatgagccactgtgcccagccactcacttggattttgaaagtaagtgtttcaaaaatccagcaaaattactcaaacacaatgttcacgtaaaaaaaaggaaattttaaggtgcttgtatttcatacctcaacaaggaaagcaaaattatccattcccttcagacaataaatgtattattgtactattttcatgaaaaatcatgtagcaaacaattagtaatataaaaacacttctaggagttaccaagtatttgtttgtttgtttttggagatggagtcttgctctgtcacccaggttggagtgcagtggcacaaacccagctcactacaacctccacctcctcagttcaagcaattctcctgcctcagcctcccaagtagctggcactacagacacatgctgcaatgcccggctaatttttttgtattttagtagagatggggtttcaccatgttgcccaggctggtcttgaactcctgagctcgggcaatctgcccgtgtcagcctccacaggtgctaggatcacagttgtgagccaccgcgcctggcctgaagttttatctcacaaaatttagaataaaactcagaaataaaaatcacaggatacagaacaaaaatattcacatcatgaatttaccctgtaaaaagagaaactgatgttttaatgaatcgatgtgactcactagttatctaccacattttcttgtggaaacctatttatttcctgcagccaaaatagaaggaagatttcccttatttttacccttggtagctagtattctaatagctattccttggaattcttttggaaatcacttagccataaaaaatacacctgacaaaatttctaaactcaccctgggaaagaaaaaggtaaatgagaatttttaggccgggcaccatggctcatacctgcaatcccagcaatctggcaagttgaggcaaatggatcacctgaggtcaggagtttgggaccagcctggcccacatggcaaaaccccatctctaccaaaaattaaaaaattagccaggtgaggccaggtgccgtggctcacacctgtaatcccagcactttaggaggtgggggtgggcagatcacctgaggtcaggagttcaagaccagcctggccaacatggtgaaaccccatctctactaaaaatacgaaaattagctgggcatggtgatgggtacctgtaatcccagctactcagggggctgaaacaggagaatcgcttgatcctgggaggtagagattacagtgagccgagatcaccccactgcactccagcttgggtgacacagcgagacttcatctcaaaaaaaaaaaaaaaaaaaaaaaattaggccgggcgcggtggctcacgcctgtaattccagcacttcgggaagttgacggatggatcacctgaggtcaggagaccagcctggcccacatgtctaaaccctgtctccactaaaaaaacacacaaattagccggcgtggtggtagatgcctgtaatcccagctactccagaggccgaggcaggagaatcgcttgaactcgggaggcggagtttcccgtgagccagatcacgccccggcactccagcctgggaaacagagtaagactccatctctaaaaaagaaaaaaaaagggagaaagagaaagaaataggtaaatgagaattttttttttttttttttgagacggagtctcgctctgtcgcccaggctggagtgcagtggcgggatctcggctcactgcaagctccgcctcccgggttcacgccattctcctgcctcagcctcccaagtagctgggactacaggcgcccgccactacgcctggctaattttttgtatttttagtagagacggggtttcaccattttagccgggatggtctcgatctcctgacctcgtgatctgcccgcctcggcctcccaaagtgctgggattacaggcgtgagccaccgcgcccggccataaatgagaatttttaaccaaagaaatatactattagattcttttgaaactcacctgctttaggcccttgtaaatactttacgtttcaagctctactaataatatgcaatttatagttaaaaaactgatgttaatataagtgaacaaatcttttcaaggtgacaaacccagggagtggcagtgctggttagaaaacagatgtgtctcactcatgagtcaagtcaggccatccaatcacttgagagattctcccaccccaacttgctcactgaagtgctcaatgaccaccctctcaggagacactgcactatgccccagtgagttcccgaagtacgttttacttcgcaaattcttgcacaatctcactggggtcatgtttttattttttgtttttagggatactatttttttcacaaaacttaaagaatccagggtgcagaaattacgtctgttttcccctcaataccagcatcagattggctgaccagcaatgaatcttcaagaaatgcaagctgagttgagtgaagacaatcttttttttttttttttttttttttttttgagatggagttttccctcttgtcacccaggctggagtgcagtagcacaatctcagctcgctgcaacctcagcctcccaggttcaaggaattctctggcatcagcctcccaagtagctgggattacaaatgtgcaccaccacacccagctaatttttgtatttttagtagagacggggtttcaccacattgaccaggctggtctcaaactcctgacctcaggtgatccgcccacttcagcctcccaaagtgctgggattacaggcatgagcaactgcacccggcccgagtgaagacaatcttaagtgtctcagggggttagcttttcaaaggaagagtacaccaggagattcctttcagctccaagcattccgctgactgctcccttgagaggctacaccctgtatctcaggttgtcgtatgggagaaaatgactcaggagctggtattcactagacactctagcagacatagtcatggcaggtatattggtttattcacagacagtagtgaaacctggggtgcctgagaacacatcacccaataaagctcccccccaaaaaactttgacctcaaaacattcttataagatccccaaaacattcttataaggtccctgtgcctagggaagatgaaagaaaaagaggcacagagatttttcttttcttttttcttttattttattttatttttaattttattattattatactttaagttttagggtacatgtacacaacgtgcagatttgttacaaatgtatacctttgccatgttggtgtgctgcacccattaactcatcatttagcattaggtatatctcctaatgctatcccttccccctccccccaccccacaacagtccctggtgtgtgatgttccccttcctgtgtccatgtgttctcattgttcaattcccacctatgagtgagaacatgtggtgtttggttttttgtccttgtgatagtttgctgagaatgatggttttcagcttcatccatgtccctacaaaggacatgaactcatcattttttatggctgcatagtattccatggtgtatatgtgccacattttcttactccagtctatcattgttggacatttgggttggttccaagtctttgctattgtgaataatgccacaataaacatacgtgtgcatgtgtctttatagtagcatgatttataatcctttgggtgtatacccagtaatgggatggctgggtcaaatggtatttctagttctagatccctgaggaattgccacactgacttccacaatggttgaactagtttacagtcccaccaacagtgtaaaagtgttcctatttctccacatcctctccagcacctgttgtttcctgactttttaatgattgccattctaactggtgtgagatggtatctcactgtggttttgatttgcatttctctgatagccagtgatgatgagcattttttcatgtgtcttttggctggataaatgtcttcatttgagaagtgtctgttcatatgctttgcccactttgtgatggggttgtttgtttctttcctgtaaatttgtttgcgttcattgtagattctggatattagccctttgtcagatgagtagatcgcaaaaattttctcccattctgtaggttgcctgttcactctgatggtagtttcttttgctgtgcagaagctctttagtttaattagatcccatttgtcaattttggcttttgttgccattgcttttggtgttttagacatgaagtccttgcccatgcctatgtcctgaatggtattgcctttattttcttctagggtttttatggttttaggtctaacgtttaagtttttaatccatgttgaattgatttttgtataaggtgtaaggaagggatccagtttcagctttctacatatggctagccagttttcccagcaccatttattaaatagggaatcctttccccattgcttgtttttgacaggtttgtcaaagatcagatagttatggatatgcggcattatttctgagggctctgttctgttcaatcggtctgtatcctgttttggtactagtaccatgctgttttggttactgtagccttgtagtatagtttgaagtcaggtaacgtgattcctccagctgtgttcttttggcttaggattgacttggcaatgagggctcttttttggttccatatgaactttaaagtagttttttccaattctgtgaagaaagttattggtagcttgatgaggatggcattgagtctataaattacctttggcagtatggccattttcacaatattgattcttcctacccatgagcatggaatgttcttccatttctttgtatcctcttttatttcattgagcagtggtttgtagttctccttgaagaggtgcttcacatcccttgtaagttggattcctaggtattttattctctttgaagcaattatgaatgggagttcactcatgatttggctctctgtctgttattggtgtataagaatgcttgtgatttttgcatattgattttgtatcctgagactttgctgaagttgcttatcagcttaaggagattttgggctgagacaatggggttttctagatatacaatcatgtcatctgcaaacagagacaatttgacttcctcttttcctaattgaatactctttatttccttctcctgcctgattgccctggccagaacttccaacactatgttgaataggggtgttgagagagtgcatccctgtcttgtgccagttttcaaagggaatgcttccagtttttgcccgttcagtatgatattggctttgggtttgtcatagatagctctcattattttgagatatgtcccatcaatacctaatttattgagagtttttagcatgaagtgttgttgaattttgtcaaaggccttttctgcatctattgagataatcatgtggtttttgtctttggttctgtttatatgctggattatgtttattgattttcatatgttgaaccagccttgcatcccaaagatgaagcccacttgatcatggtggataagctttttgatgtgctgctgaatttggtttgccagcattttattgaggatttttgcatcaatgttcatgaaggatatgggtctaaaattctctttttttgttgcgtctctgccaggctttggtatcaggatggggctggcctcataaaatgagttagggaggattccctctttttctattgattggaatagtttcagaaggaatggtaccagctccttctcgaacctctggtagaattcggctgtggatccatctggtcctggactttttttggctggtaagctattgattattacctcaatttcagagcctgttattggtctattcagagattcaacttcttcctggtttagtcttgggaggatgtatgtgtcgaggaatttatccatttcttctagattttctagtttatttgtgtagaggtgtttatagtattctctgatggtagttagtatttctatgggattagtggatatcccctttaccactttttattgcgtctatttgattcttctctcttttcttctttattagtcttgctagtggtctatcagttttgttgatcttttcagaaaaccagctcctggattcactgattttttgaagggttttttgtgtctctatttccttcagttctgctctgatcttagttatttcttgctttctgctagcttttgaatgtgtttgctcttgcttctctagttcttttaattatgttgtgagggtgtcaattttagatctttcttgctttctcttgtgagcatttagtgctataaatttccctctacacactgctttgaaggtgtcccggagattctgatatgttgtgtctttgttctcattggtttcaaagaacatctttatttctgccttcatttcgttatttactgagtagtaattcaggagcagtttgttcagtttccatgtagttgagtggttttgagtaagtttcttactcctgagttctagtttgattgcacttggtctgagagacagtttgttataatttctgttcttttacatttgctgaagcgtgctttacttccaactatgtggtcaattttggaataggtgtgatgtggtgctgaaaagaatgtatattctgttgatttgtggtggagagttctgtagatgtctattaggtccacttggtgcagagctgagttcaattcctggatatccttgttaactttctgtctcattgatctgtctaatgttgacagtggggtgttaaaatctcccattattattgtgtgggagtctaagtctctttgtagatcactcaggacttgctttatgaatctgggtgctcctgtattgggtgcatagatatttagggcagttagctcttcttgttgaattgatccctttgccattatgtaatggccttctttgtctcttttgatctttgttggtttaaagtctgttttatcagagactaggattgcaacccctgcctttttttgttttccatttgcttggtagatcttcctccatccctttattttgagcctatgtgtgtctctgcacgtgagataggttttctgaatacagcacactgatgggtcttgactctttatccaatttgccagtctatgtcttttaattggagcatttagtccatttacatttagggttaatattgttgtgtgtgaatttgatcctgtcattatgatgttagctggttattttgctcattagttgatgtagtttcttcctagccttgatggtctttacaatttggcatgtttttgcagtggctggtaccagttttccctttccatgtttagtgcttccttcaggaacccttttagagcaggcctggtggcgacaaaatctctcagcatttgcttgtctgtaaagtgttttatttctccttcacttatgaagcttagtttggctggatatgaaattttgggttgaaaattcttttctttaagaatgttgaatattggccaccactctcttctggcttgtagagtttctgccgaaagatcagctgttagtctgatgggcttccctttgtgggtaacctgagctttctctctggctgcccttaaaattttttccttcatttcaactttctggaggagtatctttgtggcgttctctgtatttcctgaatttgaatgttggcctgccttgcttgattggggaagttctcctggataatatcctgcagagtgttttccaacttggttccattctccccgtcactttcaggtacaccaatcagatgtagatttggtcttttcacatagtcccatatttcttggaggctttgtttttttctttttattcttttgtctctaaacttctcttctcacttcatttcattcatttcatcttgcatcactgatatcctttcttccagttgattgcattggctactgaggcttctgcattcatcatgtagttctcatgccttggttttcagctccatcacatcctttaaggacttctctgcattggttattctagttagccatttgcctaattattttttcaaggtttttaacttctttgccattcgttcggacttccacctttagctcagagtagtttgatcgtctgaagccttcttctctcaactcatcaaagtcattctctgtccagcttcgttccattgctggtgaggagttgtgttccttttgaggaggagaggtgctctgatttttagagtttccagtttttctgctctgatttttccccatctttgtggttttgtctacctttggtctttgatgatggtgaggtacagatgggtttttggtgtggatgtcctttctgtttgttagttttccttctaacagtcaggaccctcagctgcaggtccattggagtttgctggaggtccactccagaccctgtttgcctgggtatcagcagcggtggctgcagagcagcggatattggtgaactgcaaatgctgctgcctgatcaatcctctggaagttttgtctcagaggagtatcggctgtgtgaggtgtcaatccgcccctactggggggtgcctcccagtaggctactcgggggtcagggacccacttgaggaggcagtctgcccgttctcagatctcaagctgcctgctgggagaaccactactgtcttcaaagctgtcagacagggacaattaagtctgcagaggttactgctgtcttttgtttgtctgtgccctgcccccagaggtggagcctacagaggcaggcaggcctccttgagctgtggtgggctccacccagtttgagcttcctggctgctttgtttacctactcacgcctcggcaatggcaggctcctctcccccagcctcgcagccaccttgcagtttgatctcagactgctgtgctagcaatgagtgagattccgtgggcgtaggaccctctgagccatgtgtgggatataatctcctggtgtgccgtttgttaagaccattggaaaagcacaatattagggtgggagtgacccgattttccaggtgccatctgtcatccctttctttgactaggaaagggaattccctgaccccttgcacttcccaggtgaggcgatgacttgccctgcttcagctcacgcacggtgcaccgcacccactgtcctgcacctactgtccggcactccccagtgagatgaacccggtacctcagttagaaatgcagaaatcacccgtcttctgtgtcactcacactgggagctgtagactggagctgttcctatttgaccatcttggctccgggacctttttttttttacaatacagtatcagggtattatgctttggtttattctcacaggagatatttacaaacagaaacaaatctctttaaatgtgctatacaatgctttgtcaaaaaaggattaattaaaatatggtatcaaaaatgtacactaaaggacaaatagttaataatgtgaattagggagaggaagttgacatttggaattttcagaagaagctgttaattgagtatattattgcaagccagagttaggctggaggaatggggagaaaggggtagacttgagaagctgcttgggacacctgtggaaaatgcaggaaaatatcagtcccctgtggagtctgaaaatatttaagtggcaggcaattccactgaggtagctctaatccttgaattcctacttttaaaaagtctaactgaaatcctttttttggtaaattactacctcaagggaaaaaaaaatttaggcttaaccaactgcaaactgtcaattaagctctgactacataaccaggaaatttttacactcaaggtaaaaagtaagaaactatgtaactgtaactaacagattattgagtttaagtttttgcatcatgcaccttaaaaaaagtctttctggctgggtgtggtggcttactcctgtaatcccagcaccttgggaggccaaggtgggtggatctcttgaggtcaggaaaaaaaaaatctttccttcacgctcctcccattgaccacaaactacaatatttgaacaacactttcatttaattatttaatatttttgcagtgactcccataaatttttctttttactctttgagacggagtcttgctctgtcactcaggctggagtgcagtggcacgatcttggctcactgaaaactttgcctcccaggttcaagccattctcctgcctcagcctccagagtagctgggattacaggtgcccacaaccacatctggctaatttttttatttttggtagagacgggcttttaccatgttggccagggtggtctcaaactcctggtctcaaatgatctgcctgctttggcctcccaaagtgctgggattacaggcataagccactgcgcctggcagacgccagtaatttttattttatttttttctgagtcggagccttgttctgtcacctaggctggagtgcagtggcaggatcttggtttgctgcaaccttcaccttctgggttaaagtgattctcctgcctcagtctcctgagtagctgggattacaggtgcctgcctccacaccctggtaatttttttgtatttttactagagatggtgtttcaccatgttagccaggctggtctggaacccctgacctcaagtgatccaccctgatcaccttggcctcctgaagtgctaggattacaggtgtgagccaccacgcccggctcccaaaatattattattttaatatgtaagcaatatttattaataaagtatatatacttagaactaaatttttgaaaccaaccctgtattttacctttttagcacattgcagttcaaagcaggaacatttcaggcacctagtagccacacatggccaatagctgccacattgaagtacagcttcaatgtcagtggaggtgaagggcttgaacatcccttttctgccacaggggaggtctctacctaccaacaacttcttcagttaaaaaggtgaaacagataatggccatagaaagggcagaaggtaggaagagtaaaataaccacaggtggaccactgctggccacctgttgtccacctttcttccagtgaacaaaaaattctcagccaaaggagaagaaaactctgtgttttcagatctgtccatagtcttgatgtccaatgtttagatatgtagaaaataggttaaggcaaacttattttgctatttggccttggccctaattgtcaggctgcggttatctgttttctcctatggtgtgggtgactatgtgagtataaggaccaattacatgcatacatgtctgcatgtattttttaattactcaacgtcattttgcaagacattcaactttaaattaggggaaaaaatcaatacttttagggtgcacactgttagaaggtaactaataaccaatctgtcattgaatcctggcatcctatctgcactgagtgcatgtattagttagctaccgcagcataacaaaccatccaaaactttttagctcataattgagacggtcagccatttaggctgggctcagtgggaccattcttttggtctcagctgagctccttcagacatgtatcatcagctgcttattgactaggcagctgtgcttctgaaggtgagcatctgcttctggggctatcaacaggggcaccttgcttctcttcctcatgttatcttatcctccatctggctaacatgggcgttactcatggagatggcacattctgaaagaaaaacaggagcatttgaaatcttttgagcctaagccccaaactagcccactgtcatagtcacagatttccattgccctgagcaaataaggccagccagatatatggtttggaaaccagattctgtacttcaatgggaagagctgtaaaagcattggcaaatgaatataaaagagataaaaagcaccaggtgcggtggccaggcctataatcccagtattttgggagactggggcagggggacagattacctgaggtcaggagttcgagagcagcctaaccaacatagagaaatcccgtctctactaaaaatacaaacttagctgggcatggtggtgcatgcctgtaatcccagctactcaggaagctcaggcaggagaatcacttgaaccttggaggcagaggttgcagtgagccaagattgcaccattgcactccagcctgggcaaaaagagcaagactccatctcaaaaaaataaaataaaataaaataaaaaattgcagccagacacggtggctcacacctgcaatcccagcactttgggaggccgaggtgggtggattactagaggttaggagttcaagatcagcctgaccaacatggtaaaaccccgtctctgctaaaaatgcaaaaattggctgggtgtggtggtagctgcctgtaatcccagctactcaggaggctgaggcaggagaatcacttgaacccagaaggtagaggttgcagtgagccaagatcatgcctctgcactccagcctgggcaacaagagtgaaactaagtctcaaaataaaaaattgctgcaatttttgaaatcactttcattctgccttttgcctatgtggtttatacaactatttcacctcaagaaacttgttcagccaggcgcaggggctcacgcctgtaatcccagcactttgggaggctgaggtgggcagatcacaaggtcagaagacccagaccagcctggccaatatagtgaaaccccgtctctactaaaaatacagcaaaattagccaggcatggtggcccatgcctgtaatcccagctactcgagaggctgaggcaggagaattgcctgaacccaggaggcagaggttgcagtaagctgagttcacgccactgcactccagcctggatgacagagcgagactctggatttaaaaataaaacaaaacaacaacaacaaaaaacagccgggtgtggtggctcatgaggtgggtgaatcatgaggtcaagagatcgagaccatccaggccaacatggtgaaatgccatctctactaaaaatacaaaaattagctgggcatggtggcatgtgcctgtagtcccagctactcaggaggctgaggcaggagaattgcttgaacctggaagacagatgttgcagtgacctgatatcacaccactgcactctggcccgagtgacagagcaagactctgtcaccaaaaaaaaaaaaaaaaaaaaattgaccgggcacagtggctcatgcctgtaatcctagcactttgggagaccaaggcaggcagaatgtcagagctcaggagttcaagacaaccttgggcaacacagggaaaccctgtccctactaaaatagaaaaaattagctgggcatggtggtgcatgcctgtagtctcagctactagggaggctgaggcaggagacttgcttgatcccaggagacggaggcttgaacccaggaggcagaggttcagtgagccgagatcacaccactgtactccagcctgggagacagagtgagactctgcctcaaaaaaaaaaaaaaaaaaatgcagaaacattttgaaaggacaaaataatttgggaaaataggtgagggatgagtttagaaaattaaaacccaaaaacacattattcattttaacgatagaaaaaatttgaggaaattttttttttttttaaataaagtctcactctgtagcccaggctgaagtgcagtggtgcaatcttggcccactgcaacctccacctcccgggttcaagcgattcttctgcctcagcctccagaatagctgggattacaggtgcacgccaccacgtcctgctaatttttgtatttttagtagagacagggtttcaccatattggccaggccagtcttgaactcctgacctcatcatccacccgcctcgtcctcacatagtgctgggattacaggcatgagccaccatgcccggcctggaaaaatttttaaataaaaaaaaaactttagagaaattaaattcaacagagtttaactgaacaaagagtgatttgcaaatagagtagcatgtgaatccagagtaggctcagagagatttcagcatagccacgtggtggacaaagacttatggacagacaaagcaaagtgacatacagaaaatggaagtgaggtacagaaacagccaaattcattacaacttgaggtttgccttatttgaacatggtttgaacagttgacatccttttattgaccaaaccacagtggttggtacaagaatgggtacagtctatttacatatccagttaggtttcagttcattgtgtaaaataaacgaacaaacaaacaaaaactattgactaaaattaaacgggaaaaggggcagctttagggtataattaatttaacaatttctccctagggtcatagaccaaaacttttttttttttttttttgagacagagttttgctctgtcaccaggctggagtgcagcggcgctatctcagctcactgcaacctccacctcacaggttcaagcaattctcctgcctcagacacccaagtagctgggactatacaggtgtgcccagctaatttttgtatttttagtagagatggggtttcaccgtgctgcccaggctggtctcaaactcctgacctcaagtgatctgcttccttcggcctcccaatgtagtgggattacaggcatgagccaccacacccggctgagatagaccaaaatttagacattgatatcactgtgtcatcataaaaaatgaacttatttagtctcagatctcactgtgaaatatcagaactgtgggttttataaagtggaaacaagaacttcaggttattattttattattattatttttaaaggattagactacaggggatctctttgtgttgaaatctgctatttatagaagaaaacaaaaacttgtttgtattttctcgtgtttttttgagatggagttcctcactcttgttgcccaggctggagtttagtggcgtgatctcctctcactgcaacctctgcctcccaggttaaagcaattctcctgcctcagcctcaggagtagctgggattagaggcatgtgtcaccatgcccaactaattctgtattttgttttttctttttttctttcttttttttttttttttgagacaaagtttcactcttgttgcccaggttggagtgcaatggcatgatctcggcccactgcaacctccacctcccaggttcaagtgattctcctgcctcagcctcccgagtagctgggattacaggcgctcgccaccacgcccagctaatttttgtattttcagtagagatggagtttctccaagttggtcaggctggtctcaaactcccaacctcaggtgatccacccacctcagcctcccaaagtgctgggattacaggcgtgagccactgcacccggccttaattctgtatttttagtagagacagggatttctccatgttggtcagactggtctcagactcctgacctcaggtgatccgctcgcctcggcctcccaaagaaaaactggtctgttttaagatctacctattttcttaaattttaggtttgataagctcacttttagcatgagtgactcattttgttttgttttggtctgtttgagatgagtgcacatgctcagtccacatgatggccataaataattttgtttaaaaaattcaccccaggccgggcgcagtggctcaggtctgtaatcacagcactttgggaggccgaggctggcagatcaaaagctcaggagatcaagaccagcctggccaatatggtgaaaccccgtctctagtaaaaatatgaaaattagccaggcatggtggcacgcacctgtagtcccagctactcgggaggctgaggcagaagactctcttgaacctgggaggcggaggttgcagtgagcccagatcatgccactgcactccagtctgggcaatgcagcgagactccatctcaaaaaaaaaaaagaaagaaaaaaaaatcaccccatttgtttaagttcttacataggtcatggtgtgaccaaaactcagggccttagtgccactctgtttccattattttttttattttttatttttttataggtggaatcttgctttgttgtccaggctggagtgcagtggcactatctcagctcactgctacctccgcctcccgggttcaagcaattctcctgcttcagccttccgagtagctgggactacaggcccgtgccaccatgcgtggctaattttttgtatttttagtacagacaggttctcgccgtgttacccaggatggtctccatctcctgacctcatgatccacccaccttggcctcccaaagtgctgggattacaggcctgagccaccgcgccaggccaatttttgtattttcagtagagatggggtttcactatgttggccaggcttgtctcaaactcctgacctcatgatccacccacctcagtttcccaaagtgctgaggttacaggcgttagccaccgcgcctggcctattttgggtttttgtccttatcatgtcattcataggttatggtgtcttcatagtcacatacgtctttgagtttctgtcattctgttttacaagagaccatttgacattctagaaatgactgcatgcaaacatttataacttttgagagaatacagtgaagtagggagatattactattttaactatcaggaagatgataccaagagttcgaaacatgctttttagccagggtccccatgaacaaccaactaaaattaaataggtcaaatagttagctagataagtggtctactcatttcaaccaagcacactgttcattaatcctctacaactgcatctctgtggatgcagagtaggctcagggagcctaatggatgtatttctccaggtgcaactatcagtgttagcaagttcacaggtacttctctgttcatccaataagtaattaaaagaaataatattatttagcacaacttcagcaagtacatttaaaatctattgtgtaatcatagcctttacagtataatcttctatagggccctattaggggggatgcatttctaaccattgcctcatttactctacgccatggaaagaaagacctaacaaatgatggccattcagaaaagtaagggcatcctggcaatgctgcttaacttattgtgaaaaagttgtccttaacttatgaagtaagttaagagcagtggaccaatattctgtttctgatattgtgagggaacaaatatcccttaaaaatttctcacccacactggcccttcatcttttatctatcaaggtgtaagttttttcacacataatgttggctacaaaattctctacatttgagtataccccataagtgcacacaagagacccctttctttatttctattgtttgtagagccataaaaaactgtgaaataagtgtgtcatgatagcagagaagtatgatcttgttctgagtgagtgtgtctcaccatgaaacaagcaaaaaaaatactgctgttattttgagacagtgagttagcattttgtccaaatatgtactatgtaattttttattgatatgtaacatgcatagagaaatacatgcacaaattcttcattcaagtaaagctcagtgaattatgaagaatacacttgtgtaatcagataataaaactaggctggacgcagtggctcatgtctgtaattcagtacattgggaagccaatgcgggaggattgcttgagctcaggagttcaagaccagcctacccaacatggcaaggctctgtctctattttgaaaaaataccaaaaaaaaaaaaaaaaaagatccaggcaggctggttgcatgcctgttgtcccagctactggggaggctgaggtgggaggatcacttaagactaaaagtttgaagctgcagtaacccagcattcagccactggactccagcttgggtgacagagtgagacctgtatgtgtaaacacacacacacacacacacacacacacacacacacgtgcacatggtgggggatgtgaaaaagagaaagtgtggctcctgcaattcagtgagacctggttctccatcttgggaactgcccatccacactgaaaccacaacctagcacatgccaattagcacactaaacctgctgagataccaccgtttacccttaaaaaaaattgaagtatttcacctaaaagaagggaaaaagaaaatgatttcacatctaaagcctttgtttcctttataaaacaactgccccttgtcattcgagttgtccagaggtgtctgacaacactaacacacttatggaatcagccaggaaaaatgggcctctcaggtgacaaacaggcacaatggtaactaaaggcaatccattctcatctctacatgatgcccccaactcatgaagtggtgttaactgtgtgaaccatactcatcagaggaaagtatgttcagggcaacacaatcatgaggctgcaaatcaaactgggggcgggaagcacgtaggaggtttccatggccaagacactggtggctatccttgggtgtcatttaaaaatttcaggtgaaaaatccttttcttccagttggctcaggaaaactaacagacattactattggaattcattttactttttagaatttctaagacataaatcatgcttcaaacactccaaaagacattcagctatacctgaggctgaggacctgcctcctcctccatgttagggccctgacagcaggcaaagagaaggagcacaggggccgggtgtggtggctcatggctgtaatctcagcactttgggaggctgaagcaggcatatcacctgaggtcaggagtttgagacgagcctggtcaacaaggcgaaaccccttctctactaaaaacacaaaaattagccatgtgtggtggtgagcacctgtaatcccagctacttgggaggctgaggcaggagaatcatttgaacccaggaagtagaagttgcagtgagctgaaatcgtgccattgcactccagccagggcaacaagaatgaaactgccatctgaaaaacaaaacaaaacaaacaacaacaacaatagcaacaacaaaaacagagaaggagcacaggcaggtggggacagagaacagcccgggtctatagggatccccaaccacccccagagccggtgtctgtaggagggactgtgtggcaagaatcaggtagggagctgggcttcatggagaggttaccaccacttctgcacctttaacttttatgattccactgtggttctccccaggtctcccacccatcctaccctcactccctcattgtgtgttaggcaggtctggttaaaatggggagaataatacattcagattgtagccttcaaggtattcccatctggggtacagggagtagagaggcaagtcaaagtctatggtggtgcttacttctgggcctgagggcaggaaggccagggctgggcacatggatatctggggaaacaccactgctaattccttctccccacccggagctacaatgaggccaggacaatcacaattaataaaaccactgcagctcacatcctgcataaaactaaagtgtatcccaacccccagtcctaccacagatcttcaacttcctatcccagaacacaggaagccctccatctttttgacctaaagcctggactttaagccaggttgggcctgggggtagtggcagcaaaagcagcagccacagtgtcaaatataccaatgacttgagaaatctcatctgcacgtcattcactcagaacagacctggagttgtatacaagttaagaagggcagatctatatactcatgggcatggacacattccacacttgctggggagaatgagaggcacctgtttcccagctgcaggctgatgtccacatacaccattcacgtgtttacatttaggcctctgtattgtgtattcagtgagccagtgcaaatacatatttggggggcaccatttagtgcaacaccactccccacttgttctgggggacagtcaggagggatctggtcagctcctaattccctaggacaaaggtgcctccccctttccagcactcatatccagcagcgccatctcaggaatttttttttttaaacatgaacagcatgaggaagcaggcatggtacgacaggctcagccccagcccagatagcattcacatcttcctggatgggggttgatgcccatcactcacctgctctttagcaccgccttgtgttggttactcagggcctggggagaggtgggggggattgtagatccatggtgggaaccatctcacacccagagttcacctggccacaggccagcaagcaagtccaagtgcacagctctcgaccctgagcctcggcacctccggctgcaatttctatttatatatcaggattttaaaaaccaaaaataaacaaacaaacacaaaaacagccactttgattgaggagaaagtgggagcctaaagcagctgaccctcaaacatctccgccaagccccaggccaggccatctgaacactccaaggccacatgatagttacagaggatgacagtttccacaggtacttgtcaagcactgggctagcttctcacagagtctcagaatgcctcctcgccaataccctgtgaggggaggcctttcctcactagggcacaagaggttcctaagctcttcccaggaaatggttaacaaagtgtggagctaggggaaagcccagtcagaacaagtgactagccagggtcttcctagactccatcccttcctccacatggggcccagaggtgttgcgagcagcctcctgaccccctccatcccactctctcctcaatcaaaatggctgtttttgtgtttactcgtttatttatgggattttaaaaacctgattttttttttttttttgagacagagttttgctcttgttacccaggctggagtgcagtggcaccatctcagttcactgcaacctctgtctcctgagctcaagcaattctcctgcctcagcctcctgaatagctgggattataggcatgtgccaccatgcccagccaattttgtatttttagtagagaaggagtttctccatgttggccaggctggcctcgaactcccgacctcaggtgatctgcccgcctcggcctcccaaagtgctgagattgcaggcatgagccaccgcttctggccaaaaaaaaacccctgatattttatttatagtactttcaggcttgtatgtatgtatttgtataggctttattggaaggaagagggcttaagacagtaacatttttaaaaggtctcagtggggaatagacttccatggcacaaatgatgatgttgacctccttctgttgcctttgggcaaagtataaatagtgtgagaattggcatgtgctgggttgtggtttcagtgtgggagggcagttccttaagatggaaactgagctgtaggagccacactcaccttttatcacattccccaccatggtctttcacttttcttctgtgcttgaatttctttcaacatacatattattttgagtatatatatatatatatatatatatatatatatatatagacacacacacatatatatgtgtgtctgtgggtgtatgtatatatatgtttgtgtgtgtgtgtacacatacaggtctcactctgtcacccaggctggagtgcagtggccgaatgatgggtcacttcagcctcaatctccagtgatccttccacctcagcctctcaagtagctgggactgtaggcatgcaacatcacacaaggccaatttttaaaattattctagaaactgagcctcactatgctgcccagactggtcttgagctcctgggcttaagcaatcattccaccatggctttccaaagtgtttggattacaggtgtttgccatcaaacccagccaaaaacatttttaaaagaaccattacaaccgaattatgagctatggttgtaccactgcactccagcctgggcaccagagtgagaccttgtctccaaaaacaaagcaaaacaaaaaaaacttatgaccaaattaaatttctgaggttgtgtcatctgtgtcccctttctgccctgtaagctatcattgttaaatataatggctattgagaaaactgttagatattaagaaattcctatatatcctctaagtgagaataaggtattctgatgtggcccaatatttcctaacctctacctccagggtctaaactagcaaatcaaatcaggacaaccgacaaaggactgttggccattttcaaatggaagatgaaataccctgttagtgagagtaatccagtaattttaaaaaagagaagtcagactgagatgcagtgcagtcagggcatgattaccctggaatagccacttcacacggaacgatagaggagcctgtctaagatgaacaaatttgggtaacataattcttgcttaaccattctcagcctctgctgcccccgaccccagccccattccaaatggacatcccacgatatggtcagcagtgtggtacagcatggttagaaaggggctcagggatgggatgaagatctttcctgcattatcaaaatgattgaaaagttgttaaaaaaaaatgtccaaatgggcgggtcgcggtggctcacgcctgtaatctcagcactttgggaggctctggcgggcggtcaggagttcagaccagtgtggcgtcaggagttcgagaccagcctgggcaacatggtgaaaccctgtctctactaaaaatacaaaagtagtcgggcgtggtggcatacgcctgtaatcccagctacttgggaagttgaggcaggagaatcatttgaacccgggaggcggaggttgcagtaagccaagatcgcaccattgcactccagcctgggcaataagagtgaaactcggtctcaaaaaaaaaaaaaatccaaatgatcttttcttacccttaagtagcaaataagatgcattatacaagcagacccaggtaagggaaagagcaagtgcatttcaagtctcagctcacttcttaattagctgtaattccctgtgcattttaccctacctactttagcctgtttttctgttcataaaacgcactaatgctgaacggggcgggggcagggggtgggggtgggagtggtatggggagagtgccggtccttatccaatccttggcgctggagcggcaaccgcccaatcaagcgcgcagttgaagaggagtgcatggtttccggcatttggctgggcctttgtctctcgctcccaccagagcttggaatccgtctctgctcttctgcattctccacctcgggagcccctggggactctgtgacggcctctgttgccctgtgatctgcaggtccggagagacgcacagctaagatgtcaggacatcctggaagctgggaaagggtgagtgtgcggggttgggcatcccgaaaggagagagcgggctgtgaaaccggcgggactgccttcgtcaccgctcccgggtttccgacctgaggtccctgctggcgcagttcagccccaggcccctctggccgcaagatggcggctgggcccgcagccgggatccccgcgttcagccccgtccctgcggcgcccagtctggagctccctgggcagctctgcatgcagccccgagtatttcccagattgttcagggatgccaggcggatcatcagggcggaatcctgacttggtgtgtgcgtggcaggagctgcggcaggtggggctcccgagtctcttttcttaaacattttgtttgtttgagacggagtcttgccctgtcgcccaggctggagtgcagtggcacgatcactgcaaccttcgcctcctagactcaagcgattctcgtgcctcagccctccgaaaagctgggattacatacctgcgccaccacgcctggctagttttgtatttctagtagagaagtggttttgccatggtggaagctggtctggaactcaagtgatccgcccgcctcggcctgaccgggaaatagaagcctgaactcagtgactcaagctaaggatagtttagttctgccggcggagcctctcctgcagatgtcccagcctgctcacaatagccatggacagaacctttatgcttagagaagctgcagagccctgaaaatctatacatccacaggcagatgcagttggggttggcacaaaaatggggttgggaggctttttctgggaatagagttattgttctgaggttgtttctagattttgtgatatatgacaaatttagatttaggtaagtgggttttttttttttttttttttttcttttgtgccagagtctcattctgtcacccaggctgtagtacagtggcacgatctcggcacactgcaacctctgtctcccagattcaagcgatcctccaggctccctagtacctgggactacaagcaggcgacccgacgcccagctaatttttgcggggtttcaccattttggccaggctgttctccaactctggacaagaggtaatccacccacctcggccttccaaagtgctggaattacaggtgtgagccactgtgcctggcaagaagttacttttttttttttttttgagacggagttgccctcagtcgcccaggctggagtgcagtggtgcgatcttggctcactgcagcctccgcctcccgggttcaagcgattctcttgcctcagcctcccgagtagctgggattacaggcacctgccgtcatgcgcagcatgaagttacttaattttaaaggagtattgcagcaaggggaaagcaccagctataagatattggagaattttaaaggttagagagaaaaggactttctttcataagaagaaaagaaggtcagaaaaaaagtgggaaggggagggagggatagaacatggtgaaagcagatgctagattagggaatattttacccagaagtcagcctggtttttttgttgttgtttgttttttgtgagatggagtctcgctctgttgcctaggcaggcgggcactggcgtgatctccgctcactgcagcctccgcctcccaggttggaacaattctcccacctcagcctctcaggtagctgggattacaggcgcaccaccatgcctggctaatgttttgtatttttagtataggcggggtttcaccatgttggccaggctggtccaaaactcctgacctcaggtgatccaccctcctcagcctcccaaagtgctgggattataggcatgagccaccacacccggccaagtcagcctgtttttgaggaacataggccgagtgcggtatttttaatataaaaatacaaaaaattagccgggcttggtggcacgctgtattcccagctattcgggaagctgaggcaggagaataacttgaatctgggaggtggaggttgcagtgagccgagattgcaccactgcactctagcctggtgacagagcgagactcggtctcaaagaaaaaagaggaacataaagaggggttgtggttgggtcaaaatttgggagcctgaggaaagaaagaaacctaagcaaagtttgattaacaggtattttgttctaactactgaagacgaatgtattaattgtttataaggcaaaaaaatagcaatttagacagtctgtggcttcataatatcaaaaataggaagggtgtttctttgcaataagatgctcttgaaaacacaaaagttcaggaatttctttaatcactgctcttacctgcccacttcatcttccaccatgagttttccttgccctgtatgtttcttacatttagcttttcctgacttgtgtgttttataacaaactggtaaatgcaagtataatgcttttgttttgttttgttttgttttgtttttttgagatggaggctcactctgtcgcccaggctggagtgcagtggcgcgatcttggctcactgcgagctccgcctcctgggttcacacctttctcctgcctcagcctctccgagtagctgggactataggcgcctgccaccatgctcggctaaattttttttttttgtatttttagtagagacgcggtttcaccgtggtcttgatctcctgatcttgtgatccacccgcctcggcctcccaaagtgctgggattacaagtgtgagccaccgcgcctggctgcaactataatgttttgctaagttctgtgagtagctgtatcattatttaacttgagaagattatgagagcccccagtttataggaactggctcagaagtatagatgagaccctaggaattgtgactgggatctgcagtggtggcagtgttgtgggactgagccctgaacttgtagggtctatgctgactcaaggaggtatcagaattgagttattggacaaccagttggtgttggagaattggttgctgttcagcaaactccacacatttgttgtcagaaaaagaatatcacagatatttgagctggagggagactcttggtttctctgggaaggggaactctgttctgcacacaggctgtcacaatgcacattgtcctgtgattccagatctcttcccagggtgaaaggggactgagggcttggaagaaagaagttctgaaaacagactccctgccctcaacctgctaccaccaatgatttccgcctactaatgaacatacccactaggaatgggtgtggccagaatcttcacaaaacaagaagacttgatctgaggaattactctatagtggctttacctctaaaatttctcaccaaagaattacacaagtgcctagaggactcctggattatccctaccacaaaccctgaacctgaagcagcaacctggtctctctatcaccctgggcttgtggactaccaatcataatctcatccacctgcatggacacaggaatatgtcagaacataaccctgcctgaatcagtatctgtagcataaaccagtctttccagctaccatgcactgtcccccactcacgggtccttgatagcacctttccctcttctgtcttttgcttttctacaaaccctttctgatgtgcacagtgtgcctcaggtgcctgaatccagcacctactgggagtcagatgtccatgagttcaagattatagccctagacctggctgtcataagaacagacaaaaattagaaatacagtcttcatccttgaaaataaaagatttttctctttccttttcttaaagcatttactttagaaaacttttgtatttatttatttttatgttttttttgagactgagtcttgctctgtcacccaggctggagtgcagtggcacaatctcggcttactgcaacctccacctcctgggctcaagcagttctcctgccttatcctcccaagtagctgagataacaggcgtgcactacaatgcccggctaattgtttttttattttttattttttttgagatgtagtttcgctcttgtcccccaggctgaagtgcagtggtgtgatctcggctcaccgcaacctccacctcccaggttcaagcgattctcctgccttaacctcctgagtagctgggattacaggcatgtgccaccacgcccagctaattttgtatttttcatagagatggggtttctccatgttggtcaggctggtctcgagctcccgacctcaggtgatccacctgcctcggcctcccagagtgctgggattataggcgtgagacatcacacctggccctaattttttgtacttttagtagagatggaatttcaccatgttgactgggctggtctcgaactcctgacctcaggtaatgcacccgcctcggactccaaaagtcctgggattacaagcgtgagccactgtacctggccagaaaacttttatataattcttttctgcctacttgaaatagatacaaattattctaactgctaaataggctttttgtcagtatttttgactcaggactgtttttagaacctaggaatcatttatttaaaatgtaaatagcaaagaaaatagaactttattccattttctgttggaagataggagtttaccttcagcacagtcctggttccaagtttcaaaactacctctcatgaagacattagtttatttttcctttaattatagccaattagcaaccaaagaagacctccaatttttaggtgaatttaagataaactgtatgtgaccaatggtgctgtcagttcttctacttgagaactaattatggtggctatttgcaattgagtgtctttgcaatctcttagcagtttgcttataatggccttcacattctggagtaattctgtaataatttttttttctcttctccagttgtgtataatttttctgaggcttcagataattctgtttataattatgtttctctaagtttgtccagaattactaaacaggatatgaacacatactgtgcccaccatgcttcattctgtatggaccagtcacaacatacaattgtgcaattgggcttccattcacaacacacaattgtgcagtaaagtgcacactgccctcaaagtctgcaggcagaatggcctttcttcgtatttgggatctgcaatcattaatagcatacttttaccagatttctacgaaaattactacagggcaacaattaactattccagctctgtctttctatccccctggcatcttcagatgcgaaattctttcaaataccatttggcctgaaaactcaaccaggttcacacatttgcattgagtaagcctgagaatctaaacattttgcttattctcttgtccaaatgcctatgcatgtggcaagggtgcctttggcttgcttttctgccctcctaaacctaaatctgcagttccaaattttgagtccagctaatagggttctccattctgtgttggagcagtcttcatgtggggatttctcctctacttttcctctcctcactgtaacacaatatggagccaagttaatggtacctagaatccacacataagggctgaaatccacctgggattaacaagacagggccaggctttggatcttgtccagtgaaattttgagattgtgtgaggagctcctggtataaactgaatctggtggcagaatctctaagtgtaaagaagcatgttagccaagggaagttagggccacaactgtccagagccatgaatgcatgaatgcaaccccatctcctatgtgtgagttgtattactggagaaagtttttttgttgttgttttttatttgtttatttttttatgagacagagtctctgtctgttgccaggctggagtgcagtggcgtgaccttggctcactgcaacctctgcctccctggttcaagtgattctcctgcctcagcctcccaagtagctgggattacaggctctcatttcttgatacttgggtgaagaacaagtaggaggtctggaggctcaaactgatatgtaaacaaattgcttttattattattatttgccattagaaaaacaggtgaaacagtcatggactctactattcaggaattattattctagagccagtaaatacatggttgaattaagagtaatgtgatcagaatgaagaagggagttgcacagaagacttgggctttatttgggacactgctcttatgttgttgtgagttctgatgtcaccacctgaagggacatcatagacagaagagttgttacaattatttctgttgcttttcccttgttaagaatcgtttctaatatagtttttctagaaagtactacatgttttggttaagtcggttgttagtgtgtcatgcaaaatagagaagaggcttaaaccattaaaatcagaaaaattctgggagtcaagttcttgttggtccagcttagaaaagatagaacacaaaataagccagcagcacagagaagagaagctgagggccaactccctgccccagccctatccagacctatgctctatgagccttgtccaggtctggccccaccctgaaatctcccctcacagaactaattagaactaattacaggagatcagactcctgtttggaacaactattggatctgcagaagtgtaaaacgggtgtctacccttggtgtttcttcagagctggagctcagaatttttccaaacctaaaagcaaataaatgagagcaaaggagtatacatttggaatcttaatgtctttctttctcaatgaaaccagtgcttacattttacacagcaacctgttttacacttctgcagatccaataattgttccacagtcatgagaaagtaaatagaaacacaacaattaaaagtctctctacttatcccttcctttctatatccctcccatctgtctgtatttagcttttatagtgatagggaaaccagaagaaatagcctaagccatcatctaaatcctactgggaattatgagacacttagtacccacctttcaaaattttttgaggcttaaccgacacaatgcgagtttcccagcacagcacattacagcatacatggtgagcacatagtacaagctcaataaacactgtattaatgtatgtgtacatgttgttcaaatgcagatgtagacattactacattctccagcctctgtaaactttaaaaagctggcaaagcatgtgatcctctgagacagtgacttgtggtcttcactgtaacaaaaagtatttgtgttgcaataaaggtattagatgtaagggactctgtgtgctatactttctctgagtgctggagagcaacatcagcattaacagggaactttcgataaagaagccaatttctggacccctccaaaacctgcagaatcacattagttagagagtggctcagaataccaaatgagctatatgcacatcgaagcttgagaagcaatggtcagctaagtggttcttagcccaggcttccagttaggatacatgacaagtttgaagaaataccagtgagaggtgacagcgtgctggcagtcctcagagccctcgcttgctctcggcacctcccctgcctgggctcccactttgtggcatttgaggagcccttcaggccccccactgcacttgggagcccctttctgggctggccaaggccggagcccactccctcagcttgcagggaggtgtggagggagaggcatgagcgggaaccggggctgcgtgcggcgcttgcgggccagctggagttccgggtgggcgtgggcttggtgggccccacactcggagcagccagccagccctgctggccccgggcaatgggggacttagcacccgggctagtggctgcggagggtgtactgagtcccccagcagtgctggcccaccggcgctacgctcgatttctcgccgggccttagctgctttcctgcggggcagggctcgggacctgcagcccgccatgcctgagcctcccacccactccatgggctcctgtgcggcccgagcctccccgacgagcaccaccccctgctccacggcgcccagtcccatcgaccacccaagggctgaggaatgcgagcgcacggcgcaggactggcaggcagcttcacctgcagccccggtgcgggatccactaggtgaagccagctgggctcctgagtctggtggggacgtggagagtctttatatctagctcagggactgtaaatacaccaatcagcaccctgtgtttagttcaaggtttgtgagtgcaccaatccacactctgtatctagctgctctggtgaggacgtggagagtctttatatctagctcagggattgtaaatacaccaatcagcaccctgtgtttagctcaaggtttgtgagtgcaccagtcgacactctgtatctagctgctctggtgaggacgtggagaacatttatgtgtagctcaaggattgtaaatacaccaatcggcactctgtatctagctcaaggtttgtaaacacaccaatcagcaccctgtgtttagctcaaggtttgtgaatgcaccagtcgacactctgtatctagctgctctggtggggccttggagaacctgtgtgttgaaactctatatctaactaatctgatggggaggtggagaacctttgtatcttgctcagggattgtaaacgcaccaatcagcgccctgacaaaacaggccactcggctctaccaatctgcaggatgtgggtggggccagataagagaataaaagcaggctgcccgagccagcattggcaacccgctcaggtccccttccacactgtggaaactttgttctttaactctttgcagtaaatcttgctactgctcactctttgggtgcacgctgcttttaagagctgtaacactcaccgtgaagatctgcagcttcactcctgaagccagcgacaccacgagcccaccagaaggaagaaactccgaacacatctgaacatcagaagggacagactccagacgcgccaccttaagagctgtaacactcactgcgagggtccgcggcttcattcttgaagtcagtgagaccaagaacccaccaattccggacaaaccagtacctgtgtcttccctacaggttatgttttttcatgattagattcagattagtatttactttcctctccactaatatcacggcagtaattatgggcccatctgtgcattggcctctggatccaatttgtctaattacagctgacactaactttattcatctggctaaggtgttttctgccaagtttcttcactataaagttatttttctctttattatgaatgagtatcttggagggatggatttcccaagtgaggtttataaattgtcacatttaattgaaaaactctgtttctttttctttttaggtttttttgtttgttttttgcttatagcttgctttggagaacaaatctcatttttgttgactgtagatatcagcttttgaaactggaagttctaaaaaaggtatcagttttgtaggtttttattttatttcatctttattttacaagcatacatttcattttctgtattttcagagaaagagaacaaaaattaatatatagctaatatgtcatcttaaaaatctaaaatataacatggcacataaagccaaaaaaaaattttttttttttgagatagaatcttactttgtcgcccaggctatagtgcagtggcacgatctgagctcactgcaaccttaacctcctgggttcaagcaattctcctgtctcagcctcccgagtagctggtacgacaggtgcatgccaccatgcctggctaatttttgtatttttactagagacggcatttcactatattggtcaggctggtctcaaactcctgacctcaggtgatccacctacctcagcctcctaaagtgctgggattacaggcatgagccactgtgcccggccaaagcaaaaaattttaagaaacacccgattcagtaacaatagctcttaatttagtttatatcattaaatgttttgatcttcatccttgttttaggaaacacaaaaaagcatgcacaaagaggcttataatttttatataatttaaaatatttcttcatttaaacagaaatgttctactctccaacttttcatgtgtacatacttaccatttctgtgggtgtgtgcataaaatgtaagcatcatttgatcaattttctgttgttgccttgtttatatcaatcttctcagttatgaaaactgctctggatgttgttttacagttatctctgtatattggctcataagtccttttgagataaatttcaagtcagataaataggggtaaaacgcaaagctcagctgggcgtggtggctcacgcctgtaatctcagccctttgggagggtgaggcgcgcaaatcatgaggtcaggattccgagaccagcctggccaacatggtgaaaccccatctctactgaaaatacaaaaacttagctgggcgtgctggcaggcgcctgtaatcctagctactcaggaggcagaggcaggagaattgcttgaacccgggaggcggaggttgcactgagccaagattacactactgcactccatcctggcgacagagcaagactccgtttaaaaaaaaaaaaaaatacaggctgggcgcggtggctcacgcctataatcccagcactttgggaggccgaggcgggtggatcacgaggtcaggagattgagaccatcctggctaacatggtgaaaccccgtctttactaaaaatacaaaaaattagccgggcatggtggcaggcacctgtagtcccagctacttgggaggctgaggcaagaaaatggcatgaacccgggaggcagagcttgcagggagccgagatcgcgccactgcaccccagcctgggtgacagagcgagactcagtctcaaaaaaaaaaataaataaataaatacaaaaatagcactcaaaaatgtatattcttatattgattcgtgtttatattttgttttatatgtgcatatttatgctagttttgtggatcttatatttccacagaattagagaatatattcgaaatattactgtgtttaaaagtatcttatttagtaactcaggtcactcataagtcagaaccagttgtcttaactttcttatttcatcttgggtcaaattaggaactctgcccttgactgcatgatcaatgtgttatttatttttattagagaaactgttgacattcagggatgtggtcatagaattctctctggaggagtaaaaatacctgaacccttctcagcagaatatgtatagagatttgatgttagagaactatacatacgttgtctctgagtcggaataacttaccttcagaatatctaatgtctaataactatgataccgtaccttgttttaacctgattgtctctcttagctgagagagccggacagactccattttagtttctttacttgcagcccctttacccctctcccttaagggcataaccagtgcaagctgactccaagcacatccaggaatacacttactgataagatactgaggcaagctgtaccagcagctcctgggaatgcgctcaaagcccctgcgtttatcactttgtgatagtttaagcccctgcacctggaactgttcattttttctgtaactgtttctgtaaccatttatctttttaactttttgcctgttctgcttctgtaaaattgcttcagctaggctcccccctccccttgtagactgaggtataaaaggaaatctggccgggcgtggtggctcacatctgtaatcccagcactttgggaggccgaggtgggcgaatcacgaggtcgggagatcgagatcatcctggctaacatggtgaaaccccgtctctactaaaaatacaaaaaattagctgggcgtggtggcggcgtctgtagtcccagctacttgggaggctgaggcaggagaatggcgtgaccccgggacgcggaggttgcagtgagctgagatcgcgccactgcactccagcctgggtgacacagcaagactctgtctcaaaaaaaaaaaaaaaaaaaaggaaatctagccccttcttcggggccgagagaattttgagcgctagccatctctcggtcgctggcaataaaggactcctgaattagtctcagagtgtggtgtttctctacaactcgctgggttgcaacataacaagggctttatttctttcctttttagaatgtctccttgggaggtagtgctttgtctgaatgaatttcagagttttgctttcaggaaaaaaaaaattctaagtttgttgatgtagaaaaaaatcttcctagtgtttccagccctcccccttagttttgattcattcaaacttgaaaatgaagcacagaatttctaaacgtaaaatacttcctacatattctaaagaagctggtaggaaacagtattttggggaataatttttaaaaatcttatataatgtccccttttctccactgagcacagtactgagctggcaattacatatcctccagcattaatcatctgactttttattaaaaaacaggtcttgccatctctaagctggacctggtgacctttttggagggaaagaaagagccctggactgtgaagagtgaggagaccatagctgcacagccaggtaagtgggagtaaagatggtaggtggcctgggtgagaggttcaaaggtcaataagccagattttcttttgtcttccattattttattattttttatatatatatatatatatatatatatgtgcagatctgttttatgtgcaacaattgattctatcagataatcagaccaaggcattccactggtaattttccctcaaatcaattcaggtgaaattagatatttatgtacttcctgggctatcaaaacttgagatttcattatcaacttcagttctgaagccatacacacaattcaaaatatacattaactaggttaagtcaataaaagtgggctgaaagaaaccacaggattcaaacaatgaaaccatgtattttgtttgcctgagagtcacaatgtgaacaacaattatttcgcatatctcatagctcttcagtgtagagggagtggcttctgaacataaggtcattgcacagcaggtgggcaaacagctggtgtggcctcctggaggcttcacccagtgctgatttcttctctgcctctccttttttaggttctatttttttcatctttcatctttcctttttttttttttttcccttgagatagagtcttgctctgttgcccaggctggagtgcaatggtgcaatcttggctcactgcaacctctgaatcctgagttcaagtgattctcatccttcagcctctgaatagctgggattacagttgtgcgccacgatgcctggctaattctttgtatttttttttagtagagacagggttttgccatgttggccagtctggtctcgaactcctgacctcaagtgatcctcatgcctcggcttcccaaagtgctggaattacaggtgtgagccactgtgcctggcctcctttcctattttcctatttttttctccctttttgtctctctctttctatgtgtctttccctctgtttctctcttccttttttttgttttgtatttctctcttcctccttctctctttccctttgtttctttttaattttttttccttgtagaacttggtttattttttccttccttcctacctttctttcttcttttcttccctcctttcctcccgcctgttttctttcctactacatgagcatgccatcatgcctggctaaattttttatttcttgtagtagagacgaggcctcgctatgttcccagggctggcgtcaagctcctgtgctcaactagttcttccatttcagtttccccaagtgttgggattataggtttgaggcaccatgttctgccctctttttattttctttttcattcttcctttttttttttttttttttgctctctctcttgcttgcttgcttctttccttcatttctttctttattctacatttttctttttttcttttttcttttctttttttttggagatggagtttcactcttgttgcccagcctggagtgcaatggcgtgatcttggctcaccacaacctctacctccctggtttaagtaattctcctgcctcagcctcccaagtagctgggattatagacatgtgccgccacgcccaggtaattttgtatttttagtagagatggggtttctccatgttggtcaggctggtcctgaactcctgacgtcaggtgatctgcccaccttagcctcccaaagtgctgggattacaggtgtgagccactgcacccggctctttttttcttttcttctttttttttttttttttttttttgcgttagtctcgctctgtcacccagaggtaggtgggaagctctcagacttagtcgccagagggacagctttgggcgcgagctccacacgtggcctgcagggtggacctagtggcttcctggtcacaccatcaggtgaccagatgtgggctgagctgtggccagtacttgtggccgctggccacacgtttgggttgatcagagattcaaagcttaggaaggaaggtcagcagacttagaggccggccactgaggtgggccaccttggggggaataagtttccaacggggacagcttcaggccgcaagcgccacacatggcccagggtggaactggtgggcttctgcctccgccatgagctggcttctccttctggctgccaggtctacaggatgtcggccacaagcgtaggacttggtcgccagcttaaaatgtttaagggggaccagatggttctcgccagtgcagtaccgcttaggtccaccagaaaagctcaatgatggctcactgtgccctccaccttcctgggctcatccaggtgatcctcccattttggcctcccaaatagctggggatctggggatagttctgtgttttgtttgtttgtttttttctatccccactttgagtttgtttccacagtacattgagttttgttggtttttgttttttgggttttttttccctctctctctcatgctccttcctgtacactgcagttgctgttgttttagatttctttcacctaggcttaagtgcagttacttgatcacagctaactacagcctcgacctccctgggctcaggtgattcttctgtttcagacaccctgcttccttagtaactgggactaaaggtatacggcaccacactggcacattattttgcatatcttgctttttatttttgtagagatggggttccatcatgttttccaggctgatctcaaactcccacggtcaagcgatctgctggcctcggcctctcaaggtactgagcttacaggcgtgagccaccatgcctggttctatctctgtctgtctgtctacctacctaactacctacctacctacctacctacctgtaatcaatctatcatctatctctcctttttttttaagaagagacttggtcttgctatgtttttcaggctctggttttatatatatatatatatatatatatatatattttttttttttttttaatttatttattattttttaatataggggttgtctcaccatgtggcccccaggatagtctcaaactcctgggctcaaagtatcctcccgccttgacctcccaaagtgctgggattacaggcatgcaccaccatgcacaatctggtcatatttttgatgtgttgattctttccagtccagatgtataatctcatccctgaacatttctgatggtgtgattatgacatgtgactttatctggcaacagagtgagttgttgctcccgcctgagcccagcccccagaaaggattgtgacatatcgttggacccagaattgaggtaatgtaactattccactgccttggcactgcccacagaagacattgtgacatattgctgggtcttgtacccaggtggtgtgaatcttctctcctgccttggctcttccacagggggcattgtgtcatatcgctgggccccacacataggttatgtgactcttctgcctgtgccctgcccatgtggcccattgtgacatactgttgggtcccaaacctaggtgatgtaactctactgcttaggccctgcctacagaggacattgtgacatatccctgcatccatcacacaggtaatgcagctctcttctgcttggcccctactcacagaaaggattgtgatgtatcacagggctcagcacctagctaacatgacttttctcctcttctaggtttttgcccacaggggatattgtgacatgtcactgggcctaatactagggtgacagtactcttgtgtcatggcactgccctcagcaggtgtggtgatatattactgggcccagaacaaatgtgatatgagtctcctgcctggaccctgcctacaaggtgcattgtaacatatctggggccctttgactattttattttatttattgtattatattttatttattttaattttatttttgagacagaatctcactctgtcacctaggatggagtgcagtggcgtgatctctgctcacttcaacctttgcctcctgggttcaagtgattctcctgcctcagcctcctgagtagctgagactacaggtgtgtgccgccacgtctggctgatttttgtgttttcagtagagacaagatatcaccctgttggccaggccgatatcaaactcctgacctcagccagtccacccgccttgacctcccaatgtgctgagattacaggtgtgaaccattgctcttggcaccctttgactattttatgtgactcttctctcttacctggacattgaccaaatgggcccagcaccaaggtgatatgactctcctctcctgcctgggccttgcccttagaagagagagtgacttactgctgaatttagcatacaggtgatatgattcttctgctgactcgcagaagtcactgtaacatatatgtgggcccattgctgaggttgtgtgactctcttctccctgggacctgtccacagtagggattgtgacatattgcttggccaagcacctacattgtgtgactttttatttatttatttttttaagacagagttttgctcttgttgcccaggctggagtgcaataccatgatcttggctcagctgggattacaggcatgcgccaccacacctggcaaattttttttatgttttcagtagagatggggtttctccatgttagtcaggctggtctcaaactcccaacctcaggtgagccgcctgccttggcctcccaaagtactgggattccaggcatgagccactgcacctagcttcgatatgactgtcttcttatgccagggccctgccgactggagtgattttgacacatagctggggccagctcaaatgttatgtgactccacacttcttcctgagccctatctgtgaggggcactgtgtcttatctctgagaccgttaattaggtaatataacttttatttttttgagacagagtctggctttgttgccccggctggagtgcagtggtgtgatcttggttcactgcaacttccgcctcctgggttcaagtgattcacctgcctcagcctcctgagtagctgggattacaggtacacatgccaccacgcccagctaatttttgtatttttagtagagatgaagtttcaccatgttggccaggctggtctcgaattcctgacctcaagtgagccacctgccttggcctcccaaagtgctgggattacaggcatgggccaccacacctggccaatgtaactcttttgtttggactgtcttcttggggtattgtgatatattgctgggcccagaatccgggtgatgtgactctgctgtttcatctctgcacaaaaagggattgtgacataccactgggtcaagaacctagatgaggtgactctcctctccagcctgggacctgcacacattgtgtactaagacatatcactgagtctaacacctaggtaatgcaactctcctgcatgggccctgcccataggggtattatgaaatatctttctgttaatcacctaggtgatgcgacactcctcttctacctgggaactgccaaaacaagtattggtacatatcactgggcccagcacataggtgatgtgactcttttctcatgcatgggctctgcgaactggggtgttttttacatatagttgggcctaaaccctaggtcgtgtgattcttttattttcctgagctgtactcacagagagcattttgacatgtttttgggcccgtaatttagatgatgtgactctcttggatgggccttccccggaatgggtattgtgacatattgctgagcccattatataggtgatgtgactctcttgcatgggccctccacataaggggtagtgtgacatattgctgagcccagtaggtgatgtgactcttctctatggtttgggctttgcccaagcagggattgtgatgtgttgctggactcaccacctatgtgttgtgactctcctcttctgcctaagccctgcatgcattgtgtgttgtgacatgcctggattcaacacctaggtgatacaactttatggcaggggaaccacccacagaagtattgtatcatctttccatcacttaggtgatgtgattcttttatttttcctgtttctggcatattttgggtatagtgacataccattgagttcaacacccatgaaatcggaggcttctgcctgagcccagcacataagtgaccttgtgacatatctttgcattcattatctaggagatttaactcccctttttgcctgcaccctgaccactgggaagattgtggcaaatcaccggtctcagcaatcaagtgatgtgtttttcctgcctggtccttgcccacagatcattgtaacatgtcactgggcctagcatccaggtgatgtgactctgctgactatattctgctttcaagaggagattgtaacgtatccctaatcgagcacccaggtggtgtgacacttctgccctatccctgcccttagagatgattgtgacatattgccccaaaaggcaggtgatgtgagtcttctggtcaatccctattcactggtgggattgtgatacatatcttatccaaacttataggggcaatatgactctcatacctctaaacaaccaatagcagatacactagttctcatagccagggtcaggaaaatgagtaatgtcttgggtttcttctttgtatgaaggtcataaagaattaacactctgtcacatactgtgtaaagtcgtcaagaggtacagggaatgtcctaacagaactcagcacacaggggaggttgcgacactcatatgcatagcctgccaacagtaaagactgtcatccttccacataaacacagctcactgttgaggttctgaatctcatacccagatgaagttgaaagttagaaaattaaatctcatgttaattcgatccatagagaggttagtgtctctgagaccaagattcagcacacctgtgagtcagtgacttcattaaaatgacagaatttgcaggaaggattgaagttctcatgcacaaatccagaccatcattgagactgtcactcaggtacttacacccaacatacagagggtattttgtctcatacctagaactaagaaatgtgtgaaattgttaatctcatacctcgaccttaattcaggtgtgtttgtgacatacaccttttttaagcacctaagtaatttgactctcctgcctgggcccaacgtacagatgggattgtgccatatttctggacccagcatttaggtgatgtgagtctattctcttgtcttagtgctttccacagagaacactggacatatcacagggcctagtgcccaggtgatatgactttcctctacttcctaggcttttcctaagaagggattgtaatatattgctgggtcagaacctaggtcgtgtgactctcctgtgctgcctggttcctcttgtacattgtgtattgtgacatgtggcttgttctaacacctcgatgatgtgaatctcctgcatgggccctgtccacagaggtattataacatatctttttattcatcacctagatgatgtaactcttttctatctgggccctgccaaaagggaggattgcggcatatcactggacccagcatctaggtgatgtgattctcctgttttccctgggcctcaaatattttggatattgtaaaatattgctaggcccactacctatgggattgcatgctcctgcctgggctctgcccacagggaccttgtgacatatatctgcgtccatgacctaaaaggtgacacttcttgcctgcactgtgccctgaacaggaaatattgtgacatatccctggaaccagacaccaggtgatatggctcttctgcccctgtcttgcccccagggagcattgtgacatagtgcttagctcagcacccaggtgatgtgactctgttgcctgtgctgtgctttcaggagagaattgtaacatatccctggctgagcacccaggtgatatgacactcctgcttgtttccttccctcggggaagattgtgagataccttggctgaaatcccaggtgatgtaactctcttgctaactccctacctacaggttaaatggtgacatatactatagtcagcttataagtggaatgatgactctcatacctctagtcagctattggaagaaatactgtctctcatagctcgacttagataaatgagtcacttccttggtcttctctttttatgaaggtcataaagaattgccacactctaacatattgtataatgccctcgagtgttacaaacgtgttatcccagggcacacagcacaaaggtgagattgtttcttatatgcacacctcaccaattattaggattatcaccctcacacagggaaagagcctatggctgaagtcttgaatctcaaatgcaaacagaatctcaaatgcaaacactgtccacagttggaattgtgactcatgtatgagcctccaaccacagttgagatggtgacacatttctaaactcagaacatagcagatgaggactctactctcttaaacccaacaaattaagagagatgttgactaatacctgggcttagggccacaagtatggtcatgggtgcttacaaacatgattttagagtaaattgtgcctctcatttatactggataaagcctttgagtagtatagtgtactaaccaggcgcagtggctcacgcctgtaatcccagcactttgggaggccgaggtgggtgaaacgaggtcaggagttcaagaccagcctgaccaacatgttgaaaccccatctctactaaaaaatacaaaaaattagctgggcatggtggtgggcacctgtaatcccagctacttgggagcctgaggcaggagaattgcttcaacccgggaggtggaggttgcattgaattgagatcatgccactgtactccagcctgggtgatagtgcgagactctgtctcaccaaaaaaaaaaaaaaaaaaaaaaaaaaagagtgtactaacaagacccagcacacagaggagattttctctttttctttttctttttttcttttgagatgaagtcttgctctgtcaccccagctggagtgcagtggcgcgatctcagcttactgcaatctccacctccgggttcaagtgattctcctgcctcagcctcctgagtatctgggattacaggcacataccaccatgcccggctaatttttgtacttttagtagaaacagggtttcaccatgctggccaggatggtctcaatctcctgacctcgtgatccacctgcatcagcctcccaaagtgctgggattacaggtgtgagccactgcagccggcctggagattttcactgttatatgaacacccatcaaaaagtatacatcatcatattctcacataaacacagcccacttttgaagttctggatcacacctagaggaagtcaaaggtggaaaaattgactcttatatatggatccagtccataggtgagttggtgacactcagagcaagattcagcatgcgtatgaggctgtgacttcactaattagacaaagtccacaggaggagtataggctgtcaggtacaaatttagttcactgttgacattgtaactcctgttcttagacacaacatataggaagggttaacctcctttacctaaaaccggaacatgtgtgggattgttaatttcatctctgcaccttcccacaggtttaattgtaacatttttctctgcccagcacctgagtgatctgactctcttgcctaagaccagcccacagatggaatagtgacacatagctgaacccagaactgaggggatgtgattctatttttctgcattggtgctgctcacaggggacattgtgacatatcgctggaccttacacttaaatgatttgagtctcctcccctgccttggcactgcctacggaaggcgttgggacatgtctctgagccctatgcccaggttatgtgactctcctgcctgttccccgaccacataagcaattgtgacatattgctgggtttgacaccctggtaatgtaactctactgccaaaaaggagcattatgacatatatttccattcattacccaggtgttatgactctcttctcctgcctggtccctgctcacagagggaattttgacatatcccttggctcagtaccaacaagtgtggttcttcttccatcataagttctgctggcaagggagatggagacatattgtggagctctatgccaatgtgacattactgtttgctttggcctggacctcaaaaggcattgtgacatattgctgggcccagcaacatggtgacatgagtctcctgtatggaccatgacaacagagcattgtgacatatctttaagagcatcaactatttgatgtgactctccttttctaccaaggtttccccacaatgagagattgtgacgtatcttctgacccagaaatcaggtgatgtgtttctcctgcctgagctttgctcatagggagcattgtgacatatcactcgtctcagctcccaggtgatgtgactgtactgtctgtgccctggtttcaggaggaaatttaacatatccctgactgagcacccaggttttaattcttctgcctggtgccttctctcagagaagtttgtgacatatccctggcctattacccagatgatataagtctcctgctcactccctatccacagtggagattgtgacatcttttttcagatcataggcacaatgttggctgtcatatctgaaaccagtcaataggagacatactatctctcatatgtgggcttaggtacatgggtaagattgtcactcttctctttttaggaaggtcagagaaaattacactctctcacatattgtataaagtcctcaagtggtatacagagtgtcataacggctctagaaaacagatgggattgtgatttatgtatgcacactttgccaattgttaagattgtcaccctcatccatggacaaagcctactggagaggtcttaaatcttacatgtggatgcagtgcagagttgaaattgtgactgtcatatgtgaacatcaggcaacagctgaggtggtgactcattagtaagcctagcttatagggaggtaacaactctcatatctggacccagtcattatagaggtgttaactctcatatctgggcatagagccacaggtacgattatgggtcgataccattacaattgtctcccagtcacaaaagattgcgactctcatgggaaccttataaattcctcggttggtacagggaatgttctaactaggctcattgtacagttgaggttttgacactcaggcacacccagccgacagtaaagattgtcctcttttcacatgaatacaatccactggatgttctgaatctcatatccagagacagttgcaagttggaaaatttactcttataagtgaatccagtccaaagttaagttggtgactttcagaccaagattgaacacactgttagtctgtgattccactaaggtgaaacagccagtaagagggattgtgtctctcattcaatgattcaattcattctaaaaatgtgacttgtgtacttggatttaacatacaggaggtgttgactctcataccaagaattggggtatatacaggattgttagtctcatccttggtctttccttcaggtgcagttttgacacacttctgtctagcagctgagtattgtgatcttcagaactggcccagcctacaaataggattgtgccacactgctggacccagcacctagatgatgtaactattctcctgccttggtgctactcaaaaaagacattaacatatctcagagccttgcacccaggtaatgtgagtctcctctcctgccttgctgctgcacacagaagcgggttatgtacaggattgttaatctcatttggaccttcctgcacctatgattgtgacacatgcctctgtgtagaacccaagtgagttttctctcctgtttggatttaacccacagatggaatcgtgacatatcgctgcaccagaaactaggtgatgtgactccatttccttgcctctgtgctttccacattaggcattgggacatatcactgggccttgcatccaggtgatgggagttttctttttctttctttctttctttcttttttttttttttgagacagaatttcgctcttgttacccaggctggagtgtaatggtgcaatcttggctcaaggcaacctccgcctcctgggtttaaacaattctgtctcagcctcccaagtagcttagattacaggcatgcgccaccacgcctggctaatttttgtatttttagtagagacagggtttctccatgttggtcaggctggtctcgaactcctgacctcaggtgatccacctgccttggcctcccaaagtgctgggattacagttgtgagccaccgtgcccggccagtgatgggagttttctctcctgctttggtgctgaccacagtgagcattgtaaaatattgctgccatcacccctagattatgttaactctcctctgctttgcccacgtggttcactgtgacatattactgggtctaaaacccagaaaatgtaactcccttatttaggttctgcctgcaggagccattgtcacacatctctgtgctcaccacccaggtgatgtgactgccttttactgcctagttccttctcacaaaacatcttgtggcatactgctaggcccagtacctggctggtgtgactcctctcttctttctaggttccacctgcagcaaagattgtaacataccgctgggcccaacagcataatgacgttattcttttgccttgggcctgccctcagaaggcactataaaatattcatggccccagcgccaaggtgatgtgtgtctccagcctggatcctgcccacagagggcattatgacatatctcttggcccatcagatgtttaatattatctcctcccatttcctaccctgtgtttgcctgtaagagacattgtcacatgttcctgggcccagcacctaggtgatgtcttcctgagacctgtccatatggggattgtgatatattgtgtggcccagaacttacttgatgcgactctcctctcatgactaggccctgcttacaggtgtgattgtgacacacagcttggcctagcccctaagttatgttactctgctcttattcttcagtcattttcacagggggcattgtgacatattgctagactgagaacttaggtgatgtgactctcctctactgcttggaatattcccaaaaagagagtttgatatattgcttagccaggatcctaggtgatgttactcttttctcctgcctaaaccctgcatacattatgtattttggcactggggccacaacctaggtgatgtaactctcctgcatgggctttgcctacaggggtatgatgatgtttcttttctttcatcacccaagtggtgtgactctccacttatgcctgggtcttgatgaaagaggaattgtgacatatccctggccctagcacttaggtgatgtaacttgcctttattgccagggcatggcatattatgaatattggacgtatctctgggactgacacctaggggatgagaggttcctgccttggccctgcccacaggaggctttgtggcatgtctctggcctcattacctagaaagatgtgactcttctcttctacctgcattcttcccacagagaagattgtgacatcactggatccagcaattagaaaatgtttctctcctgcctgagccttgcccacaggaatattgtgacatatccttgggctcagcacccaggtgatggaactctgccacctgtgccctgtctacttaggctattgtgaagctggtttcaatacccaggtgatgtaacattcctgccaggccactgccttccagggatattgttacgtacctttgtgccaatcaccaaggtgatgtgaatcttttcacctgcctagtccttgttcactaggggataatgatatctattgctggtttcagcaccaagctgatgttacttgcctcttcttcacagattctgctcacagaaaaactaacacatcactaggcccatcagcgaaattattttgcctggccctgcccttaaaagacattgtgacatactacagtgcccagcatcaatgtaatttgtctcctgcctaaaccctgcctactgggggcattgtgacatatctcttggcccatcaactatttgatgtgactctactttcttacctgggctttgccaatagtagagcttgtgacctatctctgggcccagcacctagatgttatgactctcccgcctggtccatgcacacaaaaaagagagtgacttatactaggatcaacacacaaatgattctattcttctgcattatcccagcccacatggcttattgtgacatctctaggttcatcatctagatgatatgactctccttcctgggaactgtccataatgaagattgtgacacatcacttggcccagcacctatgtgatatgactcctttcttttgcctgggcctatcagtttgggtgattgtgtcatatagctttactcagcaccttgattatgtgactctcctgtttctcctgagtcctacccacagaggtcattgcaacatatccctgagcccctaatttaggtaatttgactcctgcctgggccctaccctcattgatttttgtgacatagtttttgactcagcacctaggtaatgtgattcttctccactgcttggactctgtcacagaaggtattgtgatgtatcactggggctgacacctaggtgaaggtactgtcttctcctgcctgggccctgcataaattgtatattttgacatttcactaggttcaacacatgggtgattcaactctctcacatggaccgtgagcatggggttattgagacatttatttttgttcatcacctaaccgatgtgactcctctctgatccctgtcaaaaggaaagattgtgacatatcactggaaccagaacttaggtgatgtgactcttctgtctaacaaccacatattttggttattgtgacatttcactgggccaaacacctcagccctgtccacaggggttcttgtgacatatatctgcatccattacataaaagatgtgatgccttttctacctgcaccctccccacaggaaaggttgtaacacactgcagggcccagccaccaggtgatatgtctctcctgcatgtgcataactttcaggagaaaattgtaacatgccactggttgaaaacccagatgatgtgactctcctgccttttcacagccctcagggaaaaaaattacatatcatttgcccagcatccaggtaatgtcactctcctgggtggtttgtgccaacaagttggttggtaacatatatctcggcccagctcacaggtttgatggtgactctaatacctcctaccagccaatagaagagacactgtctctcacaggtaggcttagaaagaggagtaaaattcctggctgggtgtggcggctcacgcctataatcccagcacttcaagaggtagaggtggacggatcacctgatgtcgggagttcaagaccagcctgaccaacatggaaaaaccctgtctctactaaaaatacaaaaaattagccaggtatagtggcacgtgcctgtaatcccagctactcgggaggctgaggcaggagaatcgcttgaacccaggaggtggaggttgtggtgagctgagatcacaccgttgcactccagtctgggcaacaagagtgaaactctgtctcacaaaaaaaaaaaaaaagaaaaagaaaaaggagtaaaatcctggtggtctctctgtatgaaggttatagagaattaccactctcttgtatattgtgtaaagcacttggatggtacagagcatgtcttctgtaccataggacccagcaaacaggttagatcatgtttcatgtaagcacatcctgccagtttttaggattgtcatcctcacacatgaaagagcccactgactgatgaggtcataattctcatggatggatgcagtccatacttaaaattgtgactatcttatgtgaacatgtggccacacttgagatggtgaatcatttctaaacccagctcatagtggtgaggactctcctctctggacccagctaattggagagatgttaaatgtcatacctagacttgggaccacattagatcatgtgttcagagcaggttgcaactctcaggcacaccatatacagtccacaagagagtgtcctgacagagagaagcacacaggtgagactgaaatttatattcacacccagtcaataccaaagattgtcatccacttaaacacactcttcttttgaggttctgaatctcacttttggaggcagctgagtgttggaaaattgactctcatttgtggatttttgtccacagttgggttagtgactcgttaaccaaaattcagcacacctttgtgactgcaacttcactaaggagcataatttatttattttgagatggagttttgctcttgttaccgaggctggagagcagtggcacgatcttggctcactgcaaactctgcttcctgggttcaagtgattctcctgcctcagcctcctgagtagctgggattacaggtgcccaccactatgccagctaattttttgtatttttagtagaactggggtttcaccatgttggtcaggctggtcttgaactcctgacctcaagtgatccacttacctcagcctcccaaagtgctgggattacaggtgtgagcctccttgcctagactaaggcacataatttgcaaaagaaattgaggctcttatgcacaaatccagtccaccattgagactgacccctgtacttagacccaacatgcaggaagtgttgactgtcattccttgactcaggacatgagtgtaattgttaatgtcatcacaagacctttctacaagtgtcatgtgacatacatcttagcccagcatctgagttatttgtcttttcctgggaccagtccacagtgccatatcaccgggcccatacccttggtaatgtgattctattctgctttgataaagcgcacagtggtcattgtgacattgcttggtgttgcacccaggtggtgtgagtcggctcttctgccttggtgctgcccacagatgtattgtgacatattgctgggcctatgttatgtttatcttttgcttgtgccctaaacacatagcctgagtccaacgaccaggtgatgtaacacttcatcctggaccggtctacagaggggattgtaatatatgtcttcaccaatcaccctggaaatgtgacttacttttcctgcctgtccctaatcacagggggtactggaacatattgttgggcccagcacgtagctgatgtgacaatttttttttgggttctgctcacaaaagagattatgacatgtgattgtgcctaacactaaggtgatgttactttttttttttttttgctttggctctgcccttagaaggcattgagacatggctgggctcagcactaagaagatgtgagtcctctgcctgaagcctgaccacagggagcattgtgacacatttcttgacccattacaatctcttctacgggcaaagctgaggtaaatgcccgttttacctatgtgatgtgacattcctcttctgcctgggccatgcccacagaatagagtgacgtattggtggggcaagcaaaacagtggtgtaattattctgcctggtccctgtacacaggagtcactgtgatacatgtttgggcctcccacctagatgatgtgacttttttcttctggagtttgtccacagtgggaattgtgatatgccacgtgacatagctcctatgtgatgtgactctttctcattcttggcctctttccactggggttactggaacataaagctgagcccagctcctaggctgtgtctctcctttctaagccctacccacaaaggacattgtgacgtatctctaggcttctcacctaggtaatattacttttttacctaggcccacccctcaggggtattgtgaaatactgctggaccaacatgctagatgataggagtctctgctactgcttggggtgtgattaagaggaaattgtgatgtgcatttgggtgcatccagcacctaagtgatgttaactctcctcttgtgcctgagacctgcatgcaatatgtgtttttgtgttttttgtttgtttttgagatggagttttgctccttttgcccaggctggattgcaatggtgcaatctcagctcaccacaaccttcatctcccaggttcaagcaattcttcagcctcagccccctgagtatctgggattacaggcatgtgccaccaagcccggttaatttttctaattgtagtagagatggggtttcttcatgttggtcaggctggtctcgaactcccaacctcaggtgatccaccgacctcagcctcctaaagtgctgggattaccggtgtgagccaccgcacctggctggcatcatgtatttcaacatgtctctgggtccaacaacattatgatgagactttcctgtgtgggctctcacacagaactattctaacacatcttttcattcattatcttggcgatttgacttttctgttccgcttgagcactgccaaaagaaaaatttgtggcagatcactggacctagcacctaggtgatgtggctcttctcacttgcctgagacctgcatattttggttattgtgacatatcactgaaacaaacacctaggggttggaaggcttctgcctgagcccctcccacagagggccttggaatatatttttttatccatcacctgggagatgaaaccctctacttctacctgccttcttcccatagagaagattgtgatatattgctgggcccaggaaccaggtgttttgtctatcttttctgggctttgcctacagtgagccttgtgacacccaggtgatcatactcttcttcctatgccctgctttcaggagaggattataacatctctggttgagaactctgtgatgtgactctccttgctggtgcatgctgtcagggaagattgtgacataaccctggctcagcacacagttgatgtgactcttgtgcttgttctctacccacaggtggaattgtgacatataacttggccaagcacacagatgtaatggtgtggtgactctcatacctagaactgggacctgtgcaggattgttaattcattactggacattcctgtgggtgtgattgttacatatgcctatgttcagcacccgagtgatttgattttgctgcctggtctcagtccaaatgtaagattgtgatttatcgctgaatccagcacctcggtgatttgactctccctttttttgtgggagggatcctgcaaattttgggtattgtcaattattgctgaatcctgtacccatgttatgactctcccaaatgtgccttacctgttgtggcacaatatatcacattagacattgttaaatattgttgggttcaacacctgggtgatggatgtaactttttttctgggcctgcctacaggggaccttgtgacataactcaatgcccatcatcatggtaatgttactctcttctcctgcctgatctctgctcacagagaaattgtgacacatcactggcctagcatctaggtgatgtgactctcctctttttttcaggctctgcatatttgggtattgtgacatattgctgaactcaacacctaagggatgggagtctcctacctaggcccttcctacaggggacattgtgacatgtctctgcattcctcatccaggagatgtgactctccttttctgcctacaccctgcctacacagaaagttgtggcatattgctgtggtcagcaaccagatgatatatttctcctgcctgggtctttattacaggaaagatgattgacatattactgggcccagcatccagatgatgtgactctcttcttctgttggtccttgcttacagggaaactgtagcatattgctacacccaacacctagcttatgtgattcttcttttaggtttgccttcagggaacattgtgacatattgctgggccctgcactgataatttgtgactcttctgcctgtgatttgcccacttggggcattgtgacatattgctgggtttaacactcaggtgatgtaacttttatgcctaggccttgcttacaggaggcattttgaaatgtctttgtggctgggcatggtggctcatgtctgtaatcccagcgcttggggaggccaaggtgggcagatcacaaagtcaggagttcgagaccagcctggtcaacatggtgaaaacctgtctctactaaaacaaaacaaaacaaaacaaaacaaaacaaaacaaaacaaaacaaaacaaataaaaccacaaaaatcagccaggtgtggtgattggtgcctgtagttgcagctactcaggaggctgaggcaggataatcgcttaagtccaggaggtggaggttgcagtgagctgagattgcaccactgcactccatcctgggcaacagagtgagactccatctccaaaaaaaataaaataaaataaaataaaaatacaaatgtctttgcaccaatcctacaggtgatgtgactctcttgtgttacctggtctctgcccccaggaagaattgtgacctttcacagcgtatagctaatttttttcttttatttcttagtttttctcctgcaggaaagattgtgaaatattactgaactaagcaccaaagggatatattttttttcttggacctgcccatgtaagaccttgtgacatattgctgggccctacacctagatgatgtgagttttctgcccgtcaactattttatgtgactctcctctcttatcttcactttgtccataggttagcttttaatatacctttgggcctgggtcatgctaatagaagcaagagtgacttattgttgggcccagcacacaggggatgtgattcttctgcttggttcctgccgaaatggtcattgtgacatatctatgggtcagttggctaaatgacaggactctttttatctttctggagcagtccacagtaggaaatttgacatatcgctgggcccagcacatatctgatgtgactctcctctcatgccaaggccttgcctactgtagtgattgtgccatatagctgggcccagctcctacgttatctgactcctgttttcttcctgagccctatgaaaagattgcattattaaatatttctgggtcttttacctaggtgatgtgacttttctttctggcttgtcctctcagagggtattgtgacatgttgctgaatgcagcatttaggtgatacgacccttcctctactgcttggactctgaccaaaaagggattgtgatgcatcactgggcccagcacctacgtaatgggactcttttctcttgcctggaccctacaaatattttgcattgtgacgtgtagctgggtctgccacccaggtaatgtgagtcttccacataagccctggccacaagagtattatgaaataactttttattcatcacctaggtagtgatgtgactcttcatcagcctgtaccctgccacaagggaattgtgttgtgtcagtgggtccagcacctagatgatgtaactcatcttttggctggacctttcatattttacatgttgttacatatcactgcatctgacattaggggatgagaggcttctgcctgggccctgcccacagatggcctcgtgacatattttggcatccatcacctaagaaacgtggctctcctcacctacatgcaccatgcacaaagaaaatattgtggcatatcactgggatcagccaccaggtatgtgtctatcctctcagggtgttgctcacagagagcgttgtaacatatcactgggcccagcacacaggtgatgtgacttgtggcctgtgcctatctagcctttttttttttttgaggcagagtctcactctgttgcccaggttggagtgcagcgatgtgatcttggctcactgcaaaatctgcctcctgggttcaagcagttctcctgccttagcctcccaagtagctgggattacaggcatgcattaccacaccgttctaatttttgtatttttagtagaggtggagtttcaccatgttggccaggctggtttctaactcctgacctcaggtgatccacttgccttggcctcccaaagtgctgggactaccagcatgagccactgcacccagtctacctgcagccatcttataggattagattttaatccatccccagccaagaacctagatgatgtgatatgactctcctgtctggtccttgccttcaaaaaagattgtgacatacctttagatgagacccaggtgatgtcactcttctgctcacttcctacccaccagtgtcattgggacatatatcttgcttcagcttgcaattgctatgatgattcttataccttgaaccaggcaataaaagagttatagtctctcctagctaggcttaggaaaacaaacataatccttagtctcctctttttgccaaggtcatagagaattaacactctctcaaatattctataaagccctcgggtggcacagagagtgtcatcaagggacaaaaacactgatgatattgcgtttcttttcttttctttcttggagatggagtctcactttgtcacccaggctaaagtgcagtggcatgatctcagctcactgtaacctctgcctcctgagttcaagtgattctcctgcctcagcctcccgagtagctgggactacagatgtgtgccaccaagcccagctaattttgtatttttattacagatgagttttcaccatgttggccaggctggtcttgaactcctgacctcaggtgatctgcccaccttggcctcccaaaatgctgggattataggtgtgagccactgctcccagcccaagattgtgtttcttaaaagaacatcctggccaggctcaagcctgtaatcccagcactttgggaggccgaggcaggtggatcacgaggtcaggagttcaagaccagcctggccaacatggtgaaaccccatctctactaaaaatataagaactctccaggcgtggtggcgggtgtctaatcccagctactcaggaggctgaggcaggagaattgcttgaacccaggaggcagaggttgcagtgagccaagatcacgccactgccgttcagccttggtgacagagtgagactccatctcaaaaaaaaaaaaaaaaaaaaaaagaatattctgccaggtgtggtggctcacacctgtaatctcagcactttgggaggccggctcacgcctgtaatctcagcactttgggaggccgaggtgggcggatcacaaggttaggagattgagaccatcctgactaacatggtaaaaccccatctctactaaaaatacaaaaaattagccagatgtggtggcacatgcctgtagtcccagctactcaggaggctgaggcaggagaatcacttgaacccaggaggccactacactccagcctgggcagcagagtgagactttgtctcaaaaggaaaaagaaataaaaacatcctgccgctcattacaattgtaacctcaaaatagagcccactggtgaggtcctgaatctcatatgcagatgcagtccacagttggaattgtgactgtgatatgcaaacatcgagccaggaatgtctcatttctaaagctacaaatgatgactcacttctaaatgtagttcataggcagatgaggactctcctatattgatcagccaattggagagatgttgactctcatttctgggattagagcagcatgtactatcaagggtccataccatcacaaatgtcttagagtggattgcgactcacatgcatattgcataaagtcctcaggtaatgcattgaatgcccttacatggcccagcacacaggtgacattgtgatgctggttttcacaaccagtcaacagtaaatatgtcatccttttagaaaaacacaacctacttctgaagttctgaatctcaaccctggaggcagtgggaagttgcaaagttgactcccatgtgtggatctgctccacagctgggctggtgactcagaccaagattcagtgcacctgtgaggctatgattttactgagaagacagagtctaaaggagagattgaggctctttttcatgaattcatccatattgagattgtgatttctgcacttagacccaacctccaaatggtcttgcctctcatacctagaatgggaatatgtgaggaattattcatgttattcctgagcctttctgcatgtgtgattgtgacacacatctctgctcaaaacctgaggaatttgactctcctgcctgggcctggcacacagatgggattgggacatattgtttgaagcagtatttagatgatgtgaccctatactctttccttgttcctgtcacagagtacattgtgacatatcactggtccctgcacccaggtaatttgtttgtcttttttatgccctgcccacatgggctattgtaacatattgctgggtctaacacccaggtaatatgaatctcctacctatatcctgactacaggggccaattttgccatatttctgaacccgtcatctatttgatgttactctccactttttttttcttggttttaaggagtggagagtttaataggcaagaaggaagggagaagacagaaagaagaagctcccctatgcagagacagagggaggggagctccaaagccaaaagagaaggccccctactctcgacttttacataggcttttccctaagagacattgtaacatatctgggccaagcacctacgtgatgttactctttgctccttcctgggccctgaccaagaagggggagtgactaatccctaggcacagcacacaggtgatgtaatatttctgcctgttccctgtccacaggagacatagtgaatgtccctggcctactaaacaagatgatatgactattttttgtctctgagacctgtcaacagtggggattgtgacagatcacttgtctcagcacctacataatttttccccatgcctgggtgcttcccactggggtgattgtggcgtataactaggtgaagggcctaggttatgcgacttttctcttctacgtgagcctcacccacatagggcattttgacatacctctgaagctctaatttaggtagactgctgcatggacccttcatttttcaggaagtattgtgccatatttttttgacctagctataatgcttctaatgccactgcactccagcctgggtgacagagtgagactacatctcttctaatgcttgggctctgcccaaggagggattgtgatgtattgctgggcccagcaccttggtgatgtgactctcctctgcttctacagggttcaggacggaaaggagagttacatcacttaggtgatgaacaaaatgatatgtcataattcccctattagcagggctcatgcaggagagtcacatcacctaggtgttggactcagccatatttcaatatgcaaattgtatattgtgtttattaaaaattgtatatattgaaatatggctgggtccaacaggtagatggtgtgattctcctgcttgagcccttctaatagggaaattatgacataatcattttgtttataacctaagtgatgtaactgtccttttctacttgagctctgtataaaggggggattgtgacatatcactggacccagcatctggtggtaccagtctctttctgtttttctttttcattttttttttttcttctgagatgtagtctcgctctgtcacccaggctggagtgcagtggcatgatctcggctcactgcaacagccacctcctgggttcaagcaattctcctgcctcagcctcccgagtagctggggttagaggcatgcaccaccacacctggctaatttttgtatttttcgtagagatggggtttcgccatgttggccaggctggtctcgaactcctgacctcaagcgatctacctgcctccgcctcccaaagtgctgatattacaggtgtgagccactgtgccacgccttattaccctcctcatcagccctgtgtattttgggtattaagacatatttctgggtcaaaccaaatgggtgaaaggctcttgcctgggccctgcccacaagaggccttgtgacacatctctgcatccactgctttggaggtgtgactctcctcttccatctgcaccatgaccacacagaaaattgtgacatacctctgggttcagcaaccaggtgtgtacccaggtcttacctgcagagaaaactgtgacatataacttggcccagtatccaagtaatgtgactttgttgtctgtgccttgctttcaggagagaattgtaacataaccctggtcaggcaaccaggtgatatgactctctgtctgatccctaccctggaaaaattgtgacatatttctgacccagcacccaggtgatgttactctcctgttttctttctactcacagtttgggttgtgacatataccttagccaagctcacagttgtggtgatgacactaataccacaaaccagccaaaaggagagttactggcacttgtaactatacttggagaaatgggtaaattcctgggtcttctctagataatgtcataaaggattacttttctttcacattttatataaagtctttggatggtacagagagtgtcatcacaagaccaagcacacaggtgagactgtgtttctcatatgcacaacctaccaaatgttagcattgtcaccctgacccatggacagtgcccactggagagatcctgaatttcacaggtgcatgcagtccacagtaaaaattctgttacatgtgatcatgccactacagttaacatggtgactaatttcaaaatccagctcataggcaggtgaagagtctcttcttgggacccagccatttggagagatgttgactcaaatacatggacttaggttcacaggtatgattatgaatccataccaggaagaaagtttcagagaaaattgtgactttcatgaatactgtataaagacctcagatggtacagagagttttataatgaggcccagaacacaggtgacattgtgacacatgcacacccagccgacagtaaagattgtcatctttccacatgaatacagctcactgttgaagttctgattctcatatttggaggtagccaaaagctggaaaattgactctcatacatggatttgggctatatgtgggttgatgactctcagaccaagattcaacataccgctgaggctgtgactccactaaggggacacagtccacagcatagattgaggctcttatgcatgtattcagtccacctttgagattgtaactgatgtactcagactcaacatacaaaaagtgttgactctaatacctagaaatgggacatgtgcaggattgttaattttatccctacattttcctgcaactgtattgcaacatacacctctgaccagcacctgagtaatttgattctcctccctggtgcccagcccacagattagatcatgacacatcactagacccaacacctaggtggtgtgactacatttgcctcagcactgcccacagggaggcattgagacatatggctgagccccacaccttggttatgtgactctcattcctgtgccctgccattatgggtcattgtgacatattgctatgtgcagcatccaggtgatgtaactctctttgctgggttctgcctaaaggaagcattacaacctatctctgtaccaatcaccaaggtaatgtgactctcttattctaccaggtccctgcacacataaataattttttctattactgggcccagcatcgagctgaagtgactcttctcttctaagtaggttctgctctcaatgtagattgtgacatactgctgggctaaacaaggtgatgtgagccttctgtccaaaccctgcccatagcaagcacagtgacatatctgtgaatccatcatctttgtgctgtgactcttacttgggtttggcctataggagagattgtgacatatctctgggaccagcacttagatgatgtgactattctttcttcccatggccatgcttccatgaaagagcgtgacttatccctgggataagcacacaggctacgtcattcttctatctggcccctgtccacagggattattgtggcatatctctgggcccattacctagatgatgtgactctactcttctttctggggcctgtccacagtgaggattgtgatgtatcacttggcccagcacttatgtgatgtgactcttctcatgctttggctctgcccactggagtgattgtgatatgtagctgggtccagctcttaggttatgcaatctatcttttctctgtgagccctacccacagggggcattgtgacatatctctgagcctctcacttagatgatgtgaattttctgctagggctgttttcccagagggtattgtgacatttctgggcccagaacctaaatgatgtgactcttctatggcttgggctctgcccaaaatatgactcatttttgtgactgatctctgcatacatgtattgtgatgtatggctggaaccagcacctgcataatatgagtcttctgcatggactcttttcaggagggtattatgaaatatcattttgtttatcacttaggtgttgtgactctcttcttatgactggaacctgccacaaagggcaattgcaacatatcacttgacccagcacctaagtgatgtgattctctttttttgggggagggggtctcacatattttgagtattgctgggcccaacacctagggaacagactgctcctttcttgaccctgcccatgggggctttgtgacatatctctatcaggggaaccagcacccaatatttcaatgtaggttcttttctgttttccctaagtgttggccagtctgagaaataaagagaaagagtacaaaagaaataaattttacagctgggtctccggggtgacatcacatgtcagcaggttccacgatgcccccgagccgcaaaaccagcaagtttttattagcgattttcgaaggggagggagtgtacgaatagggtgtgggtcacagagatcacatgcttcaaaggcgataaaatatcacaaggcaaatgggggcagagcaagatcacaaggccagggtgaaattagaattactaatgaggttccatgtcccgctgtgcatgcattgtcattgataaacatcttaacaggaaacagagttcaaaagcagagaactggtctgactagaattcaccaggctgtaatttcctaatcctagcaagcctgggggcgctgcaggagaccagggtgtattttatcccttatcttcaactgcataagacagacactcccagagtggttattttagaggcctcaccctgggagtgcattattttgccaggcctgttccttgctgagaaaaagaattcagtgatatttctcctattcacttttgcaaaaagagaagtatgactctgttctgcccagccctacaggcagtcagggttatctcccttgttccctgaaaatcactgttattgtgttcttttaggatgcccagagttcatattgttcaaacacacatgttttacaaacaatttgtacagataatgcaatcatcacagggtcttgaggtgacatacgtcctcagtttatgaagatgacaggattaagagattaaagacaggcataggaaattataagaatattgattggggaagtgataagtgtccatgaaatcttcacaatttctgttcagagattgcagtaaagacaggcacaagaaattataaaagtatgaatttggggaactaataaatgtccatgaaatcttcacaatttatattctgctgcggcttcagccagtccctccgtttggggtccctgacttcctgcaacatatctctgcatccatgacctaaatatgtgactcctctattctggctgcacccagcttacaggaagattatgacattttgctaagtaaagtgtatcttgtgctgatctcctatgttattctgtgactaagaatgcctaacctggggttgcagcccagtaggtctcagcctcgtttcacctcaacactattcaagatggagtcgctctggtttgaatgcctctgacatagagatccattgtaaaattatgaaaaaaatttatttgaattgcagtgaataagaaatggaagacctaggatgggctattctgaaagatttagcaatatttgtatttgtcaaaatttaagttttccgttaatacttctgaatagatacattgttttattctgtcaagtttaaatagatacgcttgataatacaaggagttcccactgtgaaagaaaaataaatctcctgatgccaaaattactaatccaatagaaaagtcaagctggagactacatcaggcaaacctgtttcctattttattcttaaataagatagctacacagataaaaagctacatacctacctcacaatttgctcagaaggaaattcctagtgaatagatgacagacagaactcaaagttatctctctgaggctcacctgagacaaatgcagatctgtttgtttcctctgccctattgttaattttaaaatgcagattcactgagccaggctaaattgtgtattcagtgggagacttatcaaggactcaaataaatttattattttttctcttatctacttatgacttggaagccccaacctcaagttttcctgtcttacctgaccacaccaatgtacatcttaaacatgttattgatgtctcttgactttctaaaatgtattagaagactgtaccccaaccaccttgggcacctgtcatcaggacctcctgaggctgtgtcacaggctcctacttaaccttggcagaataaactttccaaatttattgacacttgtctcaggtaccttttgttttacacagccaaggcactgctagctggtcactactgcaccccagacttatccaccaccattgcagggactctggtttcttgatagcaattgtttcacttcaatggaagatggacaggtgtgtacctgagaatgcagcactgagctcctgggtgatgtgggatgttccaagcatcagctttcagccagtctatcttataactgttgaaagttacttagtgtagtgtgaagatgggaataaacagctcctgaatgctaacaatggctgttcattatagggtgacccaaggtggccatgccatggttctgggttcttctgtggcttctcagtggctgatggagtggtttttttggtcttgtgatacagggtgtgtgtgtctaaaggagtggagggcagggtggggaaaggaggtgacaggcaggttcctggaggtcacctcctggcattattcttgtggattgccaagtttcttgtttgaatttgtttcttgttaatagtacatgtgtcctcagcaaggaggtgaaaataaaaaaaaagagcttggaacagtctcagctctgtgaggtctgcacaatttatcaagcccagagagatgagactgtggaacttcacccaggggcattttttgttgttgttgttgtttgttttgagacgaagtctcactctgtcacccaggctggagtgcagtggcatgatcttggcatgctgcaaccctgcctcttgagttcaagtgattctcctgcttcagcctcccacatagttggaattacaggcacatgccaccacacacggctgatttttgtatttttagtagagatcgggtttcaccatgttggccaggctggtctccaactgctgatctcacctgatttgcccacttcggcctcccaaagtgctgggattaggggcaattctttaaagacatttactttctgactagcagtctcacccattatttctttattaggaatttggaaaataaaagaatatatgcagccaatcaatagcttatgcatttaaatatgaattcttggtaaataacttaggaactgccttctcactttttcaaaaagactcactttcaatggctgctaattaaaatatatattcagggcaacttaaatctgtcctcctcttggctatcctcaatatctgacattgagtaaatgtatttcaggttacattttaaccttttttattattttaagttgactgagggctggcctggaacattctccttggtataaatactccaactataagctacctgctcagtagaggaaactaatcaacagcagggcctagcataggtcaaagacacaagcagtgggaagctttttggggcctggctcctaattgcaaggacagttgcacaggtgtctctgaatgcttagacagcctggcctttcctgacccaatgccccccatcagctttttcaagcacatcttgatcttttgtcattctgttctctggggtgaaaactcatcgtcagggctgtctacaacaaaacagaagtatcaggttactaaaacctcaggaacagagattacggattgggttaagagtgtgccctttcttaaggatggtacgcatggaaaagcagcaagcagtttcagaaagatacaggaaaaattgcctctaacggatatttatacttcaactcaatttattctgtaagtggtagggaaaatgggataaaataccatatgttcaagcatttttgcttctcagtcagaatgaaaccctgcagcaggcatgtccatgtttcatgagagaaatagaagaaaaagagttggacatacaagatgatccttatttcaagcccccctgccacttggttcagcgggcatttttgggtgaagcagaacctttctgtcaggtctgaaggttcagatgtgttggtcttttttcccactaatacacctgaaagttctattgagaaccatttgtccctcctccctacccttctagtcccactctgtacccaccactccctgaagaacttagcccagtgagtactactcatagtggagctgcctatcaacctccaaggggaaatctttgtccacctacagaggttgcaaatggggaagaaggcctgtgagaggaggtgtccccttttctctgtctggtttggctctataataagacaagtttggtcatttctctgaagatgcaggaaaattcataggtgagtttgagaagttaactctgacctacagtttaacatggcaggatctgtacattttgttgtctctgtgttatacagtggaagaaaaacaatgcattttggggacagctaggactcatgcagatgaggtattggcttgcaacccgaaccataatatatatcagacaggaggtatagcagttccagatcaagatctagagtggaactatcaaagggggtgtgaggacttggaagaagagatcatatggtcacttgtttgttgaaagagatgaagaaatgtatgaaaaaacctgttaacaatgaaaaggttaagcaactttctcagggcaaagatgacaatccagctttgttttaatagtgtttagttgaggcaatcagaaaatatactaacactgatcttgcctcaatgaaaagatagacccttctgggagtacattttataacccagtctgcccctgatatccatagaaaactactaaaagcagctatgggtccccaaacttctctggaacagctttggatatggcatttttagtttttaataacagggacaaagcggaggtagcggaaagaggaagaaggacctcccacaagttgcaggtcttggttgcaaccttaagctaacctcccacatggggttgccctcctgggtcttgggttgaacaagggaagctgaaaggtgggaagcctaaacctgggtgtccgagtcactgtgccttgggcataaatcaggttgcacactgtaagaaaactgaccactggaagagggtttgtccagtgttctgaagagagccatcagcacgtgaactaatgatgggtaaaacagccaggcaagcacccaagagtgacggggactgagaccttccaccacggtttccatcagacaactagccatatatctggaaaagcctcagtattttttgccatggcagttaagaatatgaagtttcaccaggtgcggtggctcacacctgtaatcctagcactttggaaggccgaggtgggtggatgacttgaggtcaggagttcaagactagtctggccaacatggtgaaaccccatctctactaaaaatacaaaaaattagccagaaattgcttgaacctgagaggcggaggttgcagtgagctgagatcgtgccactgcactccagcctgggaaacagagactccgtctcaaaaaaaaaaaaaaaaaaaggaagctagatgagttgcgagttgcctcatgcctgtaatcccagcactttgggaggctgaggtgggtggtcgggagttcgagaccagcctgagcaacaaggagaaaccccatctctagtaaaaatacaaaattagctgggcgtggtggcacatgcttgtaatcccagctactcaggaggcttaggcaagagattcacataaacccgggaggccgaagttgcagtgagctgagatcatgccactgcactccagcctgggcgacagagtgagactccttctcaaaaaaaaaaaaaaaagaatattaactttcttctggactgcttactctgttttgacccattataatgggtctgtttcacccccaaactgtatggtcacggggatagattgacaagcccatagatgccattttacataatctctaagctgtttttcagtgacttcggttttcttacataacttccttatcatgcccggatgcctcagggaagtcgtagcaatttctctttcagtagataaagccaataaactggctttagaacaacattctgaggtttaagcccacaccaagtatgaggagttctataagccaaaagacaccagtggatgacaggggacacttattgaaatagcagacattttgctagacactccaattaacctgatatgaggtgctaatcaataaaaaatagttaaacatttgcatgactctactcatttgggaataaattccctgtttaatatctcggctttttatagaaaaataattacttaaaagagtaaaccaggtaacccaggcctgtgaactatatgcctggaacaacccaaatgaccaatgtttacctcctcctttagtaaggcctgttcagcatagaggagcataccctggtgaagactggcaaatagactatactcagatgcccccgtgtaaagggtttaaatattgattagtattcattgacacctttaccgtttggattgaggcttttcctaccaagtctgaaaaggcaatcaaggtttctaaactactaaaagaaataattccgatgggtacagtatctcacgcctgtaatccctgcacattgggaggccaaggcaggtggatcacctgaggtcaggagttcgagaccagcctggctaacatggcgaaaccccgtctctactaaaaatacaaaaattagctgggtgtggtggtgtgcacctgtagtcctagctactctggaggatgaggcatgagaatcacttgaaccttggaggcagaggttgcagtgaaccaagattgtgccattgcactccagcctgggcaacaagagtgaaactctgcctcaaaagaaaaaaaaaaaaagataatatcgagtctcgcaaaatatagtaattaagaagattctttatcacaaacccttgtggcagagcacatctcctcataggtaaaaacattgtaactatggtaaatgtgttcctcaatagtaaattaattattaaacttattcaaaattattttatttaatttttcagaacaatgcttatgttttgtatagctaattgctgtaattctttaacaaaaactgggccagacacagtgggtcatgcctgtaatcccagcactttgggaggccgaggcgggcggatcacgaggtcaggagatcgagaccgtcctggctaacacggtgcaaccccatctatactaaaaaaaaaaaaaaaaaattagccaggcgtggtggcgggtgcctgtagtcccagctacttgggaggctgaggcagaagaatctcttgaacctgggaggcggaggttgcagtgagcccagatcgcgccaatgcactccagtctgggcaacagagtgagattccatctcaaaaaaacaaaaaaaaaaaacccaaaaaactatttgattgatgtctcattacaaaatgtataaaagcaagctttgccccgaccaccttgggcacatgttctcagaacctcctgagagctgtgtcacaggccattgtcactcatatatggctcagaatcaatctcttcaatttttttttaaaccatctgtgacaaacccacagcaaacattaaactgaacaggaaaaagttggaaacattttctctgagaaatggaacaagacaatagtgcccattttcatcacttctattcaacatagtacttggaagtcccagccagagcaattagagaaaagaaataagtagcgagcctccaagttggtaaagaggtagtcaaattgtcactgttcactgatgttacaatcatataattaggaaaccctaaatactcataaaaaagcatctagatctgatcaattcagtaaagttttaggatacaaaattaatgtgcacatattagtggcattggtatacaccaacagtgaccaaactgatatttaaatcaagaactcaaccccttttaaagcagctgcaaaaaaataatactaataattaggattatccctaatgaaggccatgaaagatctctacaagaaaaactgtaaaatatgtctgaaaggtatcatagatgacacatacaaataaaaacacatcccatgcttatagatgggtagggttagtattgtaaaaatcatattaccaaaagcaagctacaaattcaatacaattcctatgaaaataacatcataatttcctcacataactaaaaaactctaaaattcatatgaaacaaaaaagaacctgcatagacaaagcaagactaagcaaaacaaaaataaactcaagatggatcaaaaatgttaagacctgaaactataaaaattgtagaaggtaatactggaaaaactcttctagacattggctttggcaaagcgtagatgaccaagaacccaaaagcacatgcaacatgaaacaaagacagatgagacttaattaattctcaaaagaagatatacaaatggccaactaacgtagataaaaatgctcaacattactaatgattaatgatcaggaaaatgcaaatcaaaaccacaatgtgataccaccttattcctgcaaaaatgaccataattaaaacatcaaaaataatgcatgttcgcatggttttggtgaaaagggaatacttttacattgctggtgggaatgtatactagtacaacactatggaaaacagtatggagattcattaaaaaattaaaagtagaactaccgtttgattcagcaattccactactgggtatctacatggtgaaaaataagtcattatatgagtaagatacttgcacatgcatgtttatagcagcacaatttgcaattgcaaaagaatggaagcagcctaattaatgcccatcaactaatgagtggaaaaggaaaatgtggcatataccacattttctttatatatatataatatatataaataatatataatatatttataataatatatatacaccaatgaatgctactcaatcataacaaggaataaaataatagcacttgcagcaacctcaatggagttgaagaacattattctaagtgaagtaactaaaaaatgaaaaaaacaaatattgtatgttctcacttataagtgggaactaagctatgagaatgcaatggcataagaattatataatggactgtgggtactcagtggcaagggtaggagaagagtgacggataaaagactacatattgggtacagtgcacactgcttgggagatgggtgctcctaaatattagaaatcactacaaaagaacttatccatgtatccaaacatcttctgtaccttaaaaactttggaaataataataataataataaacaaaaaataatcccaaaccccgtaagtttaactttctatgctttggctgtttttggtttattttttattttttagaaagggtctcactctgtcacccagaatagagtgcagtggcttaatcagggctcattgcagcctcgacctccttggttcaggcaatcctcctccctccgcctcctgaacagctggtactaaaggtacaggccaccatgctcagttaacttttgtatttttttagatacatgtttttgccatgttgcccaggctgatctcaaattcctgggcttaagcagtcttcatttcttggcctcccaaagtgctgggattataaacatgagccatcatgagtgaccacaatcttttttttttttttttttgagacagagcctcactctgtcacccaggctggagtgcagtgacctgatcttggctcacttcaacctcctcctgtcaggttcaagcgattctcctgcctcagcctctgagtagctgggactacaggcacgcgccaccacgcccagctaatttttgtatttaatagtggagatgggggtttcaccatattggccaggctggtcttgaactcctgacctcgtgatccacccacctcggcctcccaaagtgctgggactacaggcgtgagccactgcacccagcccagaattttttttaacatgatatagaaaagctaactatatttagatctgttacttaacagaaaatttgaataaacgtcttttattaaaaaacataaaattttttatctacaaatattgatacaaaacagttcaaaattacttcctaggggtttcactaaaaattagtttgttaagggtatatatatatatatataaaaactaagatttctaggtgtaaaacaatttttttatagagagtgtataaacaaaggccaggcgcagtgggtcacgtctgtaatcccaacacccaacactttgggaggccaaggcaggtggatcatttcgagcttaggagtttgagaccagcctgaacagcaaggcaaattccagtccctacttaaaatacagaaataaaccgggcatgatggcttacacctgtagtcccagctactccagaggctgaggctggagaatcgcttgaacttgggaggcggaggttgcagtgagccaagattgcgccactgcacttcagcctgggcgaaagagcaagcctctcctggaaataaaaaaacagtgtataaacaaaagcaaaatatgcttttgatgaagaaagttagaaacattttgtctactttgaaattatttaaaggttgtttcaaattgaaaatataaaaataatgtagattaaaatacaacataaaaatttaaaaaatggccaggcacgatggctcacgcctgtaatcccagtaatttgggaggctgaggcgggtggattacctgaggccaagagttcgtgaccagcctggcaacatagtgaaaccccgtctctactaaaaatgcaaaaaattagccaggtttggtgatgcacgcctgtaatcccagctactcgggaggctgaggcaggagaatcgcttgaacccaggaggcagaggttgcagttagccaagatggcgccactgtactccagcttgggcgacagagctagacttcgtctagacaaaaaataaaaaataaaaaaaagtataagagatcataaaatatgtataaaaatctagaatggtcaaaaagacaaatttgatggactttatttttgttattttattttattttttgagacaaagtctcgctctgtcgcccaggctagggtgcagtggcaggatcttgactcactgcaacctcagccccccgggttcaaggaattctgctgcctcagccacccgagaagctggggttataggcgtgcgccaccatgcccagctaatttttttttcttttatttttttgagacggaattttactcttgttgtccaggctggagtgtaatgacgcgatccacgctcactgcagcctccacctcccaggttcaagcagttctcctgcctcagcctcccgagaagctggtattacaggcacgtgccactacgcccagctaattttgtatttttagtagagatgaggtttcaccatgatagtcaggctggtctccaacacatgacctaatgtgatccgcccgccttggccatcgaaagtgctgggattacaggcgtgagccaccgcgcccagctgatggatttacttataacggtttatcaaattagctttagtgctgataatacattattactaaagtaaaagttgattttctcttgaacaaaaattatatgtattattaatatacataaaatatgtttgttcacattttgaatacattgaaaaagagagagagcaaaaaagatatagaattttcccatgctctggggtgggcctggctcagctcagggaggaagccctgcccgataaggctgcagcttaggctgtcactctttcttcagcctagggtgtgatcacatcttctatcactcagggtctgagtaggcggggccttaaacgttatccaactagggacgttgggctgggaactgtccaatcaggcacacagctggactggacaaagcggcttccgggatatggcggggcctttgtctctcgctgtcgccggagtcccaggtctgtcttcactgctctgtgtcctctgctcctagaggcccagcctctgtggcgctgttaccagcaggtattggagatccacagctaagatgccaggaccccctagaagcctagaaatggtgagaatgccagtccgacatcccgagagaggggagggggctggttggaactggtgggaagcggctgtggcgggactcaggcctccccccagtcagctccacaatctgcgcccagctcgacctcagtccccttcagaaataagatggcggctgcgctgacagccagacccccaggagtcctgtttcttccctgcgcagtgactgtgccctgtcctggagccctctctgggcagctgtggacccgcagccccgcgtctctcccagattgttcagggacccggggagggtcgtcaggggagaatcctgactcgggttgcgggttcatgaacgggaagagctttggtctgtggggttcccaggccctcttttttcccattaaaaatttatgggcgtcactgcaaaaatattaaatactttaataaaagaatgattcaaaaattgtaccacacccagctgtggtttgtacttttgtggtccatggaaggggcctgaagaaaagattgttacaaggttcatgataaagaaaaccaaattcaataattggctaggtacagcaatctaggttgtcgttttttttttttttttttcttttttttgagacagagtctcacttttttgctcaggctggagtgcagtggtgtgatctcgactcactgcaacctccgcctcttgggttcaagcgattctcctgcctcagcctccctagtagctgggactacaggcgcccgccaccacaatttttttatttttagtagagacggggttttaccatgttggccaggctggtctccaactcctgacctcaggtgatccacccaccttggcctccgaaagtgctaggattacaggcgtgagccaccgtgcccagcctcgtttcttaatttttacatttaaggtgggaatatcctggttatgtaatcagagcttaattgtcagcttattcttggttaagcaagaattttgtttccgctaatgtagtaatttaccaaaaaatgctcttgagtttagattttttttttagaagtagaaatccggggactagagccacctcaatctaattgcctgccacttaattattttcacactccacaggggactgcttttttcctgaaattttcacatgtatcccaagcagggcctcaagtccacccctcatcccctattcctccagcctaactctggcttgcaggaaaatactaaatttcccgttttgtctgacattcccaaatgccaatgtcccctccctaattcactttatcatctatttgtcctttagggtagattttgatacctgttttaatttttatttatttatttattttaatttttgagacagaggcttgctcggtcaccccggatggagtgcagtggtgcagtggtgtgatttaggctcactgcaacctctgccttatgggatcaaatgattctcttgtctcagtcgcccaagtagctggaattataggcgcccgcccccacgcctggctaatttttgtatttttagtagagaccgggcttcactatgttgtccaggctggtttcaaactcctagcctcaagcgatccgcctgcatcagcctccccaagagctggtattacagacgtgagccatctcgcctggccaattaatctttttttttttttttttttttttttttttgagacagagtttcactcttgttgcccaggctggagtgcaatggcacgatctcggctcaccgcaacctccgcctcccaggtttaagcgattctcctgcctcagcctccctagtaactgggattataggcatgtgccaccatgcctggctaattttgtgtttttagtaaagacagggtttctccatgttggtcaggctggtctcaaactcccgacctcgggtgatacgcccgccttggcctccgaaagtgctgggattacaggcgtgagccactgcacccggccaattaatcattttttgacaaagcatttgatggcacatttaaaaaggtttgttttctttttgtaaatatttcctatgagaagaaagcaaagaataatctcctgacactgtattgtaaaatatctctgcgtttttttttcttctatcttccctagtcacagatatcttatcagaatgtttttgggtcaagttttccttttggaaactatagtgtgatgtgtcttcagtcaccattcggttttcttggacctgggtttcagtactgtattgggataaacgaagatacccaccatggctatgtctgcttagagtgtctagtaaatatcagcttctgggtcatattctctcataggaaaatctgaggtattgagtgtagcgtcccaagtgcgcaggtggatgccctgagtctaaaaggcatttcctagtgcacttttttttttaaagctaattttatgagacattaatattgtcttcacccaacccagctttcatttcttaaagacacattgctggtcagtcaatcagataccagtattgaggagaaaacaaataatttctgcctcctggtttcctttagagaacagaaaaatagtaaaaaatttctagaaaacaaaacaaaacaaaacaaaaacgagggccaggcatggtggctcatgcctgtaatccctacactttgggaggccaaggagggtggatcacgaagtcaggagttcgagaccagctggccaacatggtgaaaccccatctctactaaaaatacgaaaaaaaaaaaaaaaaagctgggtgtagtggtacaggcctgtaatcgcagctactcaggaggctaaggcaggagaatcagttgaacctcagaggcggaggttgcagtgagtggatatcacgccactgcactccagcctgggcgacagagtgagactccatttcaaaaacaaaaacaaaccgcaaaaaactgaccccagtgagatggtgtaagaacttgcagagtaaaatgcgcctgagacactcactggggcatagttcagagtctcctgagagggggttattgagcactttagtgagtaggatggggtgggacagtctctcaagtaattggatggcctgacttgacacatgattaagacatatctgtgtcttgaaaaggttttttcacttattttgacctaaggcttgttttcgttgtcttgagacagtttccctctgtcacccaggctggagcgcagtggtaccatctcggtccactgcaacctccagatcttgagttcaggtgattctcatgcctcagcctcccaagtagctgggactacaggtgtgcaccaccacactcagctagtttctgtagttttagtagagacagagtttcaccatgttagctaggctgttctcaaacttctggcctcaagtgactcacctgcctgagccttccaaagtgctgagattacaggcgtgagccattgtgcccagctcacctcggttttttaactgtgtattgcattttattagtagagcttgaaaggtaagaaaatatttgcaaagggcataaaagaggtgagtttcaaaaacattaatatctaataatatattttatttgttgaacattttcatttacctttttctttctcagagtgagtttaggaagtttctcggacatgtttttttttatggaggagtgatttttttttttttttttttttttgagacagagtctcactctgtcgcccaggctggagtgcagtggcgccactttggctcactgcaacttctgcctcccgggttcgagcaattctcctgcctcagcctcctgcgtagctgggatttcaggcacacaccaccacacctagctaatttttgtatttttagtagagacagggtttcaccatgttaggctggtcttgaactcctgacctcgggtgatccgcccgcctgggcctcccaaagtgctgggattacaggcatcaaccaccgtgcttggcctatggctgagtgatttcaaacagaattccatctagcttttagaatggtagctaccaaggaaaaaaataaagaaaaaaaaaaaaaaatctctcttcaatttcagctgtagacaatgaatacatttccacaaaacaatgtgatagataattgatgagttaaatagattcctgaaaacttcaattcctttttttagcagggtaaatccttggtagtgaacatctttgttctatatcctgtgtttttttgtgtgtttgattgttttttgagataaagagttgcactgcgacacccaggctggagtgcaatggtgcaatcttagctcactgcaacctccaattcccaggttcaagtgattctccttcctcagcctccggagtagctgagactgcaggcctgtgccaccacacctggctagtttttgtatttttagtagagatggggtttcaccatgttggccaggctggtctcgaactcctgacctcaagtgatctgcccacctcagcctcccatagtgctgggattacaggtgtgagccactgcgcccagccctatatcctgttattttgatttttgagtttaatgctaaattttatgtgatgaaacttggtacctcctagaagtgttcctatgtgattaattttttttttttttttgagatggagtctcgctctgttggccaagctggagtgcagaggcgcaatctcagctcactgcaagctctgtctcccgggttcacgccgttctcagcctctcgagcagctggaactacaggtgcccgctaccacgcccagctaattttttgtatttttagtagaaacaggatttcaccatgttggccaggatggtctcgatctcttgacctcgtgatccacccacctcggcctcccaaagtgctgggattacaggcatgagccactgtgcctggccttttttttttttttaaatggaattttgatgttgttgccctgagtggagtgcagtgggcgatctcggctcacctcaacctacacctcctgggttcaagcaattctcctgcttcagcctctcgaatagctgggattacaggcacccaccaccaccatgcccagctaatttttgtatttttagtagagatggggttttatcatgttggccaggctggtcttgaactcctgacctcaggtgatccaccctcccccccggcctcccaaagtgctgggattacaggtgtgagccatcacgctgggccaagcaatcctcttgtacctcagccttccacgtacctgggactacaggcatgcaccaccatacctaggtaatttttgtttttgtatttttttagagatgggatttttccatgttgctcaggctggtctcaaactcctgagctcaggcaatccacctgccttggcctctcagagtgctgggattacaggcatgagccattgtgcctgatcataccatattttctttattcagtctaccattgataggcattcaagtcgattccatgtctttgctattgtgaatagtgctgtagtgaacacccttgtgcatgtgtgtttatgacagaataatttatatttctttgggtatatacccaattattaggttgcttgatgaaatggtaattctgtttttagttctgtgagaaattgccacactgctttttacaatggttgaattaatgtacactttaacagcagtgtataagcgttcccttttctctgcaaccttgacatcatctatttttttgctttttaatagccgttctcactggcatgagattgtatctcgtggtttttctttgcatttctccaataattattgataggcattttattatatgtgtgttagccacatgtttgtcttcttttgaaaagcatctttttcaagttttttgtctgctttttagtgaggtcttttttttcttgtaaacttaagatttttatgaattctggacattagacctttgttagaagcatagtttgcaaatatttcctattattctgttggttctctgttttctgtgttgatagtttcctttgctgtgaagaagctctttagtttaattaggtccaatttgtcaatttttggtttttttgcagttgctttttgtatcttcaattatgaattctctgctagattctatgtctagaatgacatttcctaagttatcttccagggttttttataatgttaaaataaacatttcagtctttaatcttgagttgatttttgtatatggtgtaataaaggggtccagtttcaatcttctacatagtgcttgctagttattccaccaccatttattacatagggaattggttccacatttctattgtcacctttgttaaagatcagatggttgtaggtgagtgacattatttctggactgtctattctgttgcattggtctatgagtttgtttttgtaccagttccatgttgctttgtttactgcagctctgtagtataatttgaagacaggtaatgtaatgccttcagctttgctgtttttgcttgtgattaccttggctattcagactctttggttttatatgaattttacaataatttttttttttagttcttttaaaaatattttggtcatttgattagaatagcattaaatctgtaaattttggggggcagtatgatcatttttaggatattgatcttttctatttatgagcataaagttgttttccatttgtgccatttctgacttctttaagcattgttttgcaattcttatagagatctttcaccttcctggtattcgtagatattttattctttttgtggcagttgtgaagggattgtgtttatgattcgtatttggcttggatgttgttgatttacagggacgctactaatttttgtacacttactttgtatcctgaaatgatactgcagttgtttgtaagttaaagagcttttctatgaagactatatggttttccagatggagaattatgttgtctgcaaacagggatagtttgacttcctctcttcctgtttaaatgccttttatttatttttatttttatttttttgagatggagtcttgctcttcgcccaggctggagtgaagtggcagtcttggctcaccgcaaactccacctcccaggttcaagtgattctcttgcctcagcctcctgagtagctgggattacaggcatccgccactgcgcctggttaatttttgtatttttagtagaggtggggtttcaccatgttggccaggctggtctcgaacttctgatctcgtgagccacccaccttggcctcccaaagtgctgggattacaggcgtgagtcaccttacctggccaaatgccttttatttttatcttttgcctaattactctgacaagtacttccaattttatgttgaatagtagtgttgagagaaggcatctttgccttgtgccagtttccaaagaagaatgcttcgggttttttttttcttttctttttgagatagagtctcactttgtctcccaggctggagtgcagtggcacaatctcggcgctctgcagcctccaccttctgggttcaagtgattctctttgctcagcctctcaagtagctgggattacaggcacctgccatcacacctggctaatttttatatttttagtggagacagggttttgccatgttagccaggttgatctcaaaatcctgacctcaggggatccacctgccttggcctcccaagttgctggaattacaggcatgagccactgcacccgtccacttccaggttttgtccattcagtatgttggctgatggtttgtcatatagataacttattattttaaagtatgtaccttcaatggctaggttgttgagggtttttaacatgaaagatgttaaattttatcaaaagctttttctgcatctattgtggtaatcttgtggtttctgtctagttttgtttatatgatgaatcacatttattgatttgtgtatgttgaaccaaccttacattcccagaataaattctacttgatcatactgggttagctttttgatatgctgctggatttggtttgtcagtattttgttgaagatttttgcatcaatgttcaaaggtattggcctgaatttttttttgtttgttttatctttgccaggttttggtatcagaatagtgctgttcttatataatgagttgaaaacaagttactttttcttaattgcttaaaatagtttctgtagaaataataatcagcacttttttgtacatctgatagaattcagctgtgaatctgtctggtccttggctttgtttggttggtaggctatttattactaattcaatttttgagcttcttattcatctatttaggggtttcatttcttttttgttaattcttggaaggatgtatttgttcaatacctttttcattttttctagattgtcttgtttgtgtgcacagaggtgttcatagtacatttcaagatatttttgtggggtcagtggtaatgtctcttttgttatttctaattgtgtttatttgggtccttcttccttatctagttagtggtttatttattttttcatagatttaattcctggattttttgatattttgtaaagtttttatgtctaaatctcagtttagttctgattttggttatttcttgtctgctgctagcttagggattgattttctcttgcttctttcattcttttattgattatatcaggttgtaaaatgaagatctttctaactttttaatttgagcattaaatgctataaatttccctttaacattatcttagctatattgcagagattctgatgtgttgttttttagttcttttttttttttttttttaagatggagttttactcttgttgtccaggctgaatgcaatggcacagtctcaactcacagcaacctccgcctcttgggttcaagcattctccttcctcagcctttcaagtagttgggattacaggcatgtgccaccatgcctgcctaatttttgtaattttagtagagacaggatttcaccatgttggccaggctggtctcaaactcctgacctcatgtgatctgcctgcctcagcctcccaaagtgctgggattacaggtatgagccaccatgcctggcctgttttttttgttcttatttgtttaaaataacttcttggtttctgccttaatttcattatttaccaaaaagttattcaagtgcaggttgtttaatttttatgtaattgtatcagttgttttatttttattgaactatatttctgttcagctgtggtctatgtgtttgttctgtataattttgagttttttgaatttgctgaggattattctatttctgattgtgtggtcagtttttgagtatgtgccacatggtgatgagaacaatgtatgttatgttatttttagatgaagacttctgtagatgtctattaggactatttggtcaagtgtagactttaggtcctaatgttttgttaattggcttcttcagttatctgtttgttagtgcctgtgggatgttgtagtctcccactgttattgtgtcataatttaaaactcttatagatctctaagaacttgctttattcatgtgaacccatgaattttatacaacacctttctctcttctgctttttctcccataagcattcttacgtgtgcacacagtgtgcaaaattcagatgtccaagagttcaagcacatgtgatggacctgtctgttgtaaaacaaaatataaattaaaaataagaggcttggtccacattaagataagagaaaatatcttactaaaatctcttttcttaaaacatttagattgtgtgtagatttttatccctgtttttttgagatatatgtaaatcatattaacagcaaaataaaacttttgtcattttttttgactcaggattgtctttatctgggacctgagattaattgctctttttttgctttggcaagagattattcttatgatagtcttttaaagttgacacagatttgttcagagtaaagctcattccaagagcacacaaaagttgagcataaaaatagacaaaatttagcagtacagaattataaagattaaaagatactgagtaagttgtttgacagaaacctgattatccatggtgatcgtttgcaggctgaattataaagattaaaagatactgagtaagttgtttgacagaaacctgattatccatggtgatcgtttgcaggctgaagtatttatactacaaaaacaaaaagagttcagtttatggccggacgtggtggctcatgcctgtaatcccaggattttgggaggttgaggtgggcagatcacctgaggttgggagttcgagaccatcctgaccaacatggagaaaccccatctctattaaaaatacaaaattagaagggtgtggtggtgcatgcctgtaatcccaggtatttgggaggctgaggcaggatagttgcttgaacctgggaggcggaggttgtggtaagctgagatcatgtcattgcactccaccctgggcaacaaaagcaaaactctatctcaaaaataaaataaaataaaataaaataaaataaaataaaataaaatatacaagcaaacaacaacaaaaaaaacaattcagtttataaactgaaccagtggagtctgttgtcataccttggtttctatttattacttcagtacaattagcatagttatgcagtgtttgtagacaacctcattcaaacacattcactagtattttctacaatagtatgaataaagccataatatttactttaaatgaattccttaaatagctattttaatattgtgattcatacttttgaaatgtagtttttgagctgaattataaagaaaatgtttaaaaattccacatacattatgagtagtacattaaaattattcatacttacatatttatgtctaatatccaaagaaaatttactaccaaattgttacagtagatgttagtctgataggcttattaatttaaccaatagggataattataagtaagcataatgttagtgtctttcatttcacaaattggaatgctgctattacaggacaaataaaggcaagtgatgtggccatcccaaaactgtaatacctctctagtaagctatgttgtaggctcgcatatattccattatattatcacagtcatattttaattttttatcaaaggtactggtgtaagttgtcaaatatatttcaatatagattttgccttcaatggctagatgagcgcagcagagatgaataaaaacttttaaaattccaatgataatatgccccctttcttcatagtactcatgttactcatgctgagagtagctatgcactttgggtatttagagagaaattctttttagaggaatattttctgactgacttgagcaatcttatatctaatctcaggttttttaaagaggcttttaacttccttttttctcaatataatctttcttggagtgagagctgtttttcttttgaatgctttgtatatctgttttagaagccctattggtatcccataatatctctgaaagacaggctattacagtgagaactcttggagctagctttatctggatgcatgctggaaatccagcagtatttttttcatgtaaccattataaatagaaactgtggcttaaacaatgctctctttaccattattgtgaaggtgcaattctacccaagaggcctgcaggctcttcttctgcagctcaggcttcgctcttttttttttttttttttttttttttttgagacagtcttgccctgtctcccaggctggagtgcagtgacacgatctcagctcactgcaacctctgcctcctgggttgaagcaattcttctgcctcagcctccgagtagctgaaattacaggtgccctccaccatgcccagctattttttttttttttcttgtatttttagtagagatggggtttcaccatgttggccaggctggtctcgaactcctgacctcatgatccaccagcctcagcctcccaaagtgctaggataacaggcatgagccaccctgcctggccaggcttcactctttgatgtgacactaaagtgctgctgtgggaattggcattcacctaagatgtgagctgccagctgtgagccctgcgctatgggctgtatgtcagtggcaggtggtacgaaacagaagaggacactggccaccagaagaggggaagcaagagtgcgctagcacagtcttcagggagtagagagccactgatttaaaatgcaagtagccaaaaagacagcacccttttcagtcacttttgtagaagagtgaaagtctaccttaagcagttacctggcttcaagttgcaaactaccttctgtcatgaagatgtgaaaagcttattttgtcattgaatataaccagttagcatacatggatggcctccccaatgaccaggtgaatttaggatgaactatggcatggtgctgtaaattcttctacttgtgaactaattatggtaactgtctttctgtcttttcagtctcttaagtagactgactgtaatacatgtgatattcagatttaagtgtgtaatgaaacaattttctgtctgttacattattgtggtttctctggggctgaagagaatttttaaaaaattatattttccaaacagtgtctagaattaccagacataatataaacacataaggtgccaaccaagctttattgtaaaggggactttccctcttagtcttccagtcaactcacaattatgctctaaagtgcatgctgtcacctaaatatgcaggcagaattgtgtctctgtctatttggtgtctatagtcctctatagtcacttctagaggggctagaccagatttctacaaactttatagggcagatattaatcattttacttcattccatgactcttttatcttcagaactgaaactgattcagagaccatggagcccagaaacctaatcagagtaacagtgtgcattgagtagacatggagacatgagaatctccacttcttttcccttctctcgctaaaatgctcacaattgcaggtaacaactgctgctactccacccatccgggacctaaatctgcagctctgaattctaaatctaggtcttgaaatttgaaaaaaaaaaaaaaaaaatccaaaacttttatttgaggaatgaaagtctttttacttataaaactcagagagacattaaaataaaagcacaattacatctttctcccttccttcaactatgtattcatctcttgacattgttcactattgccacaggtaggtgtaagttaaactaataatgtcacactggacactatattctatacccttacccttaatgtacagtcaatcaataattaaagttatttatttaaacaagaatttctgacaaagaagtttgtatgtctctctctctttttttttttttgccttcacaaatccacttgtaactgctgctaatcaaagtgcaaattccaggcatcttgaatatttcttctcaagttacaatacttaagcttggcccaaataaactgtctacttatattcatgttgtgtcagcttttttttttttttttttagatgtggttttgctcttgttgctcaggctggagtgcaatggcttgatcttggctcactgcaacctccgcctcccaagttcaagtgattctcctgcctcagctttctgagtagctgggattacaggcatgggccaccatgcccggctaattttgtatttttagtagagatagggtttcttcatgttggtcaggctggtctcgaactcccaacctcaggtgatccttcgacctcaggggatccgcctgccttggactcccaaagtgctggaattacaggcatgagccatggcacccagcccgtatcagcctttttttaggtaaaatattatttagaattttctagagcagcctctatgagtagatcttttgattgtactctacttgctgtaacagccagaaatgcagaatgatgtttatctagaatctgcaaataaggtctggcctctgcctggaatttataaaacagggtcctactttagattgagaatgtacagaaaaccaataggaggcattttctgcattgtgagatgtcaacatagacattttagatccctcctttgagagtgtggctctttgaccttttcacatcttgtgttttcacctgctacagttatgtgagaggctccaggtgtaaatagaatctgatggcagaatctcttaagtgtaaagaagcatcttaggagtgagagatcaaggccacaaagtagccagagctctgagcacaagtatacttacctggaaaatatgatattagagtattcttgcacttctacataccaaaaagctagctaatcaggacaggtgatccaggttctgcagctccaccagggtacttccattttctatttagaatcagcctgagtctctcctgctggcttgctattgaaccatcagtccagggtcactggaaatgctctcacaatcacctaggtgtctttgagacatttgagaatctccagaacagaattgtgtcaggctgacaagagtgggcaattttgcttctgtcttagtgtaaatgaaatgagtcatcctgtgattgttcctcccctcatgcaagagctgtcttcggttggtacccagatgagagtttctccagttccctggtacttgggtaaaaacaaggaggaggtctgcagactcaaagagataaactaattgcttctatttcatatagtcattagaaaaatagatgacgcagtcatggtccctaccatgcaggaacttttagtctagactagcaactggataaatgatttaattatgcatcatatggtgggtacaataaatagatgtgtgcaaaaatatgggctttatttgggccattttctttatattgtgacttcagatgtctatacctgaacatatattaataaacaaaatttgtttttttttttttttgccttgctaagtaaacttatttatcttctaaattattctagaaaaccttaagggatttgtttaaattgcttattagtatgtgatatgaaattagagggcaatggggctaaaaaagattaaaattacacaaactctgagatttaagttttttttttttcttttaggtaagcttaaaaaaagaaacataaaaaaaaaatactccccagtggtgtaaagaacagaattttacatcaactctacaccctgcttcagccctgtttagattcaccctttttgaaggccttatttaagtcttgccctaccctggagttttgcctcacagaactaactagaagagatcagagttttgggtgatgaatcctgttgcctttttagagttggtgctcacacttttctgaaacccaatagcagataaatggaaaaataacatgtattatagggtcttaatttaataattttatattaaaaccagtgtttacagagacattccatttagcaacttgttttctgttcctgcagatatagtagttgattcacaagtcacaaaatagcaaatataaatacaataaaaattcatctacatttcattaaactctatctgtgtccttctcatctgtctgtatttagattttattccatgcattttaaaaaactcaatgataaacagaagaggaaataaaaatgctgggtctttattctaaatccttggatttattggacacttagtatcaactcacagggtattattagaatcaaataatgtgctatcacagtgctctgtaacatcctgttgatcacatagtacctgcttaataaacattgcattaatacatgtgcacatgttgttttccaaatgcagacttactcagaaaattgctgctttctgttttctctgtaaactttaaagagccagaaaataatatgatactttaagatagagaatggttgtcttcatttgcatcagaagtatttgtgtttttacaaaagtgctgagtgtaaggggctctgtgctgtacctcatttttctaactaatgctaacaatgagcccagagagagtgacaccagcattgacagaagacttgtttagaacacccatttatggaccatttccaaacctgcagaatcgcattacatagagtggggccaattttacaaagcgattcataagctcattaaagcttgagtgataatgcttaggtaagtggttataagatcaggcttctaattagaatcacatggccaatatgcagaactctctttacttgtgcccttttcacagtttctgttctgggtgaaagcgtctatttgttttaattaagtgcctcatgtgactctcaggtgccagcatcaaatatgaggagttcaagatacattcattgagttaagttccacttttgcactaaagaatgttctaggaatctgttctgtttgagtttggtaaggataggacagtgtggccaatatttctttccttttctttttctttctttttttttttgagatggagtctcgctctgtcatccaggctggagtcaatggcacaatctcggctcactgcaacctctgcctcccgggttcaagtgattctcctgcctcagcctcctgagtagctgcgattacaggtgcctgccaccattcccagctaagttttgtatgttaggtagaggtggggtttcactctgttggccaggctgatcttgaactcctgacttcaggtgatccacctgccttggcctcccaaagtgttgggatcacaggcgtgagacaccacacccagccaacttttgtatttttagtagagatggggtttcaccatgttggccaggctgctgttgaactccagacttcgtgatccacctgccttggcctcccaaagtgctgggattcgatatttctattactgtagcagaaattcctggtgtttgtaacaggggagggcgcctggggacaaaaagaagagaaacttatatttttctctctgtggagcagctcattgttcctgaatcttttttgttgtaaaggacagaaatgggtagagtttttgtgtcttgagccttctgactttgagtgtggtggtaacaggtgaacatgtgctcaaatttttaaaggcatattgtcaagatgcaggtgtaattagtccagaatatctcatctgagaaagaattctagaggaggaggagagagaaaaagtgactttttttttcagctaaacgtgtcccagatcaagagctgtgtctactctgctttctggaatgccttgcatttagtacttgcaaatcttcacttctatacctgtgttttttctccctaataagtttttcttaactacttttaaaaatgcttatgatagtcgagggtgtctgaaaaatttttctatatacaagaatcttctctacatcatggctttttatatgccatgtaagattctcaccatgaatttgtgatctgcaatattaaaaatgttctccttgtggctgatgaacatggagaggggtggatactcaatatttctgtggggaaaacctggggttcttagtaaagacatagaatatgtaatgttgaggttctatctgtgttctttattatctgtatgcattacacaattaagaaaatactcatttaaacaggatggcatttattacccagaaagctctgaaaaaattatcaagagatacctccttattagggtgctatagaaagactacttaaaatcactattacaaattacagaacatgaaagatatctgtatcttgaacttcccataaaactgatgttttcttatgattaaattcagactgtaatttagtgggtacaatatctcagtagtaatgtcgtgtccttctgggtgcatcagcacactataaaaacctgtcctagtgcagttgatgttgatgctaataactcaataagctctcttacagattttttcactatagaattatttttctcttcatcattagatatctttatggagctgatgtgcataaaccatcacgtttaatctggctgccttttgttttttgtctttttcttttttttaggttttctttacatttatttttctttggtaaatgaaagctctcatctttgtttacaggctagaaaaactaaaaaaaaaaacaaaaaacaaaaacaacaggctcttccacttactggatgtttgacaaaatagtcttttggggccaaaacattggcattactggtgagcttggtagagattcattaactcagactttatttcagatctccccaaaaaataatctgcattaacaagatgtccagtttattgtacacgttaaaatttgagtggtaccttctaactcaagatgtctattttgtctgaaaaatataaacaactatgtctttttcatctgaaaaatatacataactcattctgcattatgtaaacgtagcactcaaaaatgtatgttagtgtttatgccttcaattttacatgttatcttccagacaagtatcacatatacactgatgtggatattttgccactctattttctcagagttagagaatacattagaaaatgttcatgtgttgacaattattttattggataatttcaatcactcttataagtcagaaccagttctatttactctaattttaccttgagtcaaatgaaaaattctgccgatagccactttgtaaatatgtgtgtttgtgtgtgttttccagggactgttgacatttagggatgtggccatagaattctctctggaggagtggcaacacctggacattgcacagcagaatttatatagaaatgtgatgttagagaactacagaaacctggccttcctgggtgaggataactttaatacaaaattcctcacataaactaaagcttttatttttctttagaatgttttctggtaatttacgcattcagatttctgttttcaagaaaatactggggatttgtctgttgagaaaggaatttcttcaagatgtttcatcttgacctgaactttccacattcctgagctaatctgtgtcctgcactttagattaaggctaatttcagaagtttagtggcataaaatattgttacatcttaaaatccatttggcatcaccaatttttgattcagtagtaccaggcagtgaaattaagaacctaaaaaattaaaatatttcctaaatatttaaaaatttctgttataaattagtgtattagaataactttgttagcatattctattatatcctccttactgagcacattactaagttggtaattggagaatataagcaagattcatttagttatttttaataaaacaggtattgctgtctctaagccagacctgatcacctgtctggaacaagggaaagagccctggaatatgaagcgacatgagatggtggatgaacccccaggtaggtgagagtgaatacaacagatgacatggatgagaggtccaaagtcaagaagaaagccactctttaaagtgatttaagaagctgtgatccaaaggaaatagtttctgggaagcctaaattttttttttaaattatactctcacataggggcatcttctgcttatgcctataaaatctaagaattctactttcccttcaatgatcttcctccaagtttacagtgacagccgaagtactgttcatggcatacaaaagagtgtacaatctgacttcttttttcttgttttgtggacagacagatctgtctccataattttgagatactgtatgttaaactgttttttaagttctctttttgcatcatgtctgaaatgtgtgagagtagtagtttctgttatattgggttttttctttttggtttatttttctgcacatttcatcctgttttcattactgtagtcttgaaatatagtttgaaagtacaaagtaggatgtccttctgctttgttctttttcctcaagattgctttgactattcaaagtttattgtagtttcatgtccattttaggattggatttttcattactgtgaagaaaaacactggaattttgataaggagttctttaaatctacaggtcactttggataatatggcagtttcataatacttattctttcaatagaaataaaacattttaaaatttattagtgtcctctctaatttttttcattgatatatctttcacttgaaagatttatgagctccttgtttaaatttgttctaaaattgagtatttcattgatattgtacataagtttttttttcctctattttatcagatagtttaagtgtatggaaccatatcttgtatattaattttatattttgctaattaactgagtgtattcattaatttaaacaggttttaatgtactctctctatatacatatatatatgattacatgatctacaaacagcaacattttacttattggtcttcaatttcaatgactttaaatttttcttttgactattttgtcttccacatgctttcagtgctatgttaaaatagaagctagttttgcattagtgtctgtaaatttgaaggagcaaacacctcttcaagtttctataaactggtttcagaaagtaaaaatgtgtttttgttgggcccccagagtgatagaatgtcctctgggtttgtagtgaagaggggttgtagcttggccttaaggctgctgggtttgcacaagggtccaccttcagttgtcttcttaaaaggagcttggatagttgtaattctcatttaatttttggacagattgaatatccttcaggactttgctgtgcagggcagacccaagggcaggtttctgcactcaggcctgcatatggtgagttttatatcaggatgtggatgagcatggctttcactgagtacaggagaggattttccgaggtaactttgggtttctacataggcaaaaccggccatgaactatggctcagggagctggaactgagtcatggaactgcttcagggaccacagtaaaggtcaaggtctgcaggcctgccagcatggctctaaatgggtgtatttctccaggcctctggaaaggcaggacccccccagactgtgactgggaagagtttgggatgtttacagagtaagtttaaaattctcaggggaaccaagttaggtggaacaatttcttgtctttagccaaaaacagtagttctgtagtttgccacctgaatgaggacctgccttctgaaaagggttaccttcagtcttgggctttagcagagtttcacaactcctttcctggatctcagagttcttttaaaggcatttatttttgatctggggtattgtaacataacccaggcaggtcttaatattttgatcaaaagcaattctccaactttcatgtaccatgtagctgtcattacaggtgtgaaccatgatgcctggttctctcataaaggcatttttgtcagcaatggctgacaaattttcttgctgacagaggataagcaaataaggcacctttaattttttatcttattaatgccactctccatataaattttaactgttttctacttcaaatttgtctgtaattttagattcagacatttagggcaatataatagaatatacatgtcgtgcctgaattaaattagataattagtatgcaggcaggcaaaaaggaattatagagccaggcgcggtggctcacgcctctaatccctgcactttgggaggctgaggtgtgtggatcacgagatcaggagattgagaccatcctggctaacacgatgaaaccccgtccctactaaaagtacaaaaaattagccgggcatggcggcacgcgcctgtagtctgagctactagggagactgaggcaggagaatcgcttgaacctgggaggtgggggttgcagtgagccaaaatcatgccactttgcttctaaacttggattacagtagttttattttgtgtaaaataacatgtatttaaaacataaaaattgagactagtttcttttaaatgcttatctattaaaagtttctcattagcatctcctaattatgattttactgcatttactctgaaattttattgctacataatagatgccattaatttaaaacacctgccttccttgaatgcacagttacagtcaaacattgcagttatctagacaaattgtttgttaatgtacattaatgttgccaactagattttatgagtaaacatttctttcattattatcttccagttctatattagtgtgttttttaagtgcaggtttcttaatatcagtttattgtgtctattgatttcgtgcattataattttagacaatcggcaattctgtttgtatactttaagtcagtgtctggtttaattaaaagataaatgagccatatgtctgtcatagtcagattatctatatgtgtgtgtttatgtctacaaatatgacccaaatttggttatagtttacttgtatatattctttcttagctaattttctttttcttttttcttttttcttttcttttcttttttttttttttgagacagagttttgctcttgttgctgagtctggagtacagtgcatgtgatctcggctcactgcaacttcctccacctctcgggtttaagtgattctctagccttagcctcctgagtagctgggattacaggcatgtgccaccatcccaggctaattttgtattttttttttttttagtagagacggggtttgccatgttggtcaggcaggtctcaaactcctgaccttgggtgatctgcttgccttggtctcccaaagtgctgggattacaggcatgagccaccgtacccggcctcttaactcattttcagtgttggttttatcttgtctaagtgagtagccttggaaatagtcttattttcaccatgtgtttaatgataaatatgtattttctttgtgtgagaaaaacacttttgtgatttgaaggtaatttttaaaaagatgtataattctgtattttttccagtttttaaaaattattgttgtaaaaacacttagcatataatttaccttcttaaatctatttaaatgtacatgtcagggccaggcatggtggtggctcatatctttaaaaccaggattttgagaggccaggacaggaggattgcttgagcccaaaagtttgatacaagcctgggcaaaatatggagacaccctctctacaaacattttttttctaagaaatagccaggcatggtggtgtacacctgtggtcccagctacttgagagactgaggggcaggattagttgagcctgggattgtgaggctgcagtgagccataattgtgccattgcgtgcaagcttgggtgacagattgagaccctgtttcaaaaaaaaaaaagtgtatatttcaggcatgttaactatattcacatcgttatgcaaaagacttctagaaattttacatcttgtaaaactaaaactcaatatcccttaaataacatttacctattttatgctctctacaacccttggcaaacacccttccaccttctgtttttatgagtgtaattactttaaatatttatataagtaaaatcataacatccatcatttcattactggtttatttcagtggacataatattctcaaagtgtatctttaaaagtgacaagatttttttttttcactgttaaatattcttctttattttccatttcagtaaaacaatagcttaagatgcagggtgaatctatatttccttttttaattttatattttaatattattatactacaagttttagggtacatgtgcacaatgtgcaggttagttacatatgtatacatgtgccatgctggtgtgctgcacccattagctcgtcatttaccattaggtatatctcctaatgctatcccttccccctccccccaccccacaacagtccacagagtgtgatgttccccttcctgtgttcatgtgttctcattgttcaattcccacctatgagtgagaatatgcagtgtttggttttttgttcttgcgatagtttactaagaatgatgatttccagtttcatccatgtccctacaaaggacatgaactcatcattattgatggctgcatagtattccatggtgtatatgtgccacattttcttaatccagtgtatcattgttggacatttgggttggttccaagtctttgctattgtgaatactgccacaataaacatacttgtgcatgtgtctttatagcagcatgatttatagtcctttgggtatctacccagtaatgggatggctgggtcaaatggtatttctagttctagatccctgaggaatcgccacactgacttccacaatggttgaactagttgacagtcccaccaacagtgtaaaagtgttcctatttctccacatcttctccagcacctgttgtttcctgactttttaatgatcgccattctaactggtgtgaaatggtatctcattgtggttttgatttgcatttctctgatggccagtgatgatgagcattttttcatgtgttttttggctgcataaatgtcttcttttgagaagtgtctgttcatgtcctttgcccactttttgatggggttgtttttttcttgtaaatttgtttgagttcattgtagattctggatattagccctttgtcagatgagtaggttgcgaaaattttctcccattttgtaggttgcctgttgactctgatggtagtttcttttgctgtgcagaagctctttagtttaattagatcccatttctcaattttggcttttgttcccattgcttttggtgttttagacatgaagtccttgcccatgcctatgtccggaatggtaatgcctaggttttcttctagggtttttatggttttaggtctaacgtttaagtctttaatccatcttgaattgatttttgtacaaggtgtaaggaagggatccagtttcagctttctacatacggctagccagttttcccagcaccatttattaaatagggaatccttgccccattgcttgtttttctcaggtttgtcaaagatcagatagttgtagatatgtggtgttctttctgagggctctgttctgttccattgatctatatctctgttttcgtaccagtaccatgctgttttggttactgtagccttgtagtatagtttgaagtcaggtagcatgatgcctccagctttgttcttttggcttaggagtgacttggtgatgcgggctcttttttggttccatatgaactttaaagtagttttttccaattctctgaagaaaatcattggtagcttgatggggatggcattgaatctataaattaccttgggcagtatggccattttcatgatattgattcttcctacccatgagcatggaatgttcttccatttgtttgtatcctcttttatttcattgagcagtggtttgtagttctccttgaagaggtcctccacatcccttgtaagttggattcctaggtattttattctctttgaagcaattatgaatgggagttcactcatgatttggctggttttttgaaaggatcaacaaaattgatagaccactagcaagactaataaagaaaaaaacatagaagaatcaaatagatgcaataaaaaatgataaagggaatatcaccactgatcccacagaaattacaaagtaccatcagagaatactacaaacacctctatgcaaataaactagaaaatctagatgaaatggacaaattccttgacacatacactctcccaagagtaaaccaggaagaagctgaatctctgaagagaccaataaaaggagctgaaattgtggcaataatcaagagcttaccaatgaaaaagagtcctggatcagatggattcacagccaaattctaccagaggtgcaaggaggaactgataccattccttctgaaactattccaatcaatagaaaaagagggaatcctccctaactcattttatgaggccagcatcatcctgttaccaaagccgggcagagacacaaccaaaaaagagaattttagaccaatatccttgatgaacatcgatgcaaaaatcctcaataaaatactggcaaactgaatccagcagcacatcaaaaagcttatccaccatgatcaagtgggcttcatccctgggatgcagggctggttcaatatatgccaattaatcaataaatgtaatccagcatataaacagaaccaaagacaaaaaccacatgattatataatagatgcagaaaaggcctttgacaaaattcaatgacacttcatgctaaaaactctcaataaattaggtattgatgtgacgtatctcaaaataataagagctatctatgccaaacccacagccaatatcatactgaatgggcaaaaactggaagcattccctttgaaaactggcacaagacagggatgccctctctcaacactcctattcaacatagtgttggatgttctggccagggcaattaggcaggagaaggaaataaagggtattcaattaggaaaagaggaagtcaaattgtccctgtttgcagatgacatgattgtatacctagaaaaccccattgtctcaacccaaaatctccttaagctgataagcaacttcagcaatgtctcaggatacaaaatcaatgtacaacaatcacaagcattcttatacaccaataacagagagccaaatcatgagtgaactcccattcataattgcttcgaagagaataaaatacctaggaatccaacttacaagggatgtggaggacctcttcaaggagaactacaaaccactgctcaatgaaataaaagaggatacaaacaaatggaagaacattccatgctcatgggtaggaagaatcaatatcatgaaaatggccatactgcccaaggtaatttatagattcaatgccatccccatcaagctaccaatgattttcttcagagaattggaaaaaactactttaaagttcacatggaaccaaaaaagagcccgcatcgccaagtcactcctaagccaaaagaacaaagctggaggcatcatgctacctgacttcaaactatactacaaggctacagtaaccaaaacagcatggtactggtacgaaaacagagatatagatcaatggaacagaacagagccctcagaaagaacaccacatatctacaactatctgatctttgacaaacctgagaaaaacaagcaatggggcaaggattccctatttaataaatggtgctgggaaaactggctagccgtatgtagaaagctgaaactggatcccttccttacaccttgtacaaaaatcaattcaagatggattaaagacttaaacgttagacctaaaaccataaaaaccctagaagaaaacctaggcattaccattccggacataggcatgggcaaggacttcatgtctaaaacaccaaaagcaatgggaacaaaagccaaaattgagaaatgggatctaattaaactaaagagcttctgcacagcgaaagaaactaccatcagagtcaacaggcaacctacaaaatgggagaaaattttcgcaacctactcatctgacaaagggctaatatccagaatctacaatgaactcaaacaaatttacaagaaaaaaacaaccccatcaaaaagtgggcaaaggacatgaacagacacttctcaaaagaagacatttatgcagccaaaaaacacatgaaaaaatgctcaccatcactggccatcagagaaatgcaaatcaaaaccacagtgagttaccatttcacaccagttagaatggcaatcattaaaaagtcaggaaacaacaggtgctggagaggatgtggagaaataggaacacttttacactgttggtgggactgtcaactagttcaaccattgtggaagtcagtgtggcgattcctcagggatctagaactagaaataccatttgacccacccaacccattactgggtagatacccaaaggactataaatcatgctgctataaagacacatgcacaagtatgtttattgtggcagttttcacaatagcaaagacttggaaccaacccaaatgtccaacaatgatagactggattaagaaaatgtggcacatatacaccatggaatactatgcagccatcaataatgatgagttcatgtcctttgtagggacatggatgaaattggaaatcatcattctcagtaaactatcgcaagaacaaaaaaccaaacaccgcatattcccactcatggggggaattgaacaatgagaacacatggacacaggaaggggaaaatcacactctggggattgatgtgggatggggggatgggggagggatagcattgggagatatacctagtgctagatgacgagttaatgggtgcagcacaccagcatggcacatgtatacatatgtaactaacctgcacattgtgcacatgtaccgtaaaacttaaagtataataataataaaaaaagaaaaataaataaagttaatattgttatgtgtgaatttgatcctgtcgttaggatgctggctggttattttgctcgttagttgatgcagtgtctttctagcctcgacggtttctacaatttggcatgattttgcagtggctggtaccggttgttcctttctgtgtttagtacttccttcaggagctcttttagggcaggcctggtggtgacaaagtctctcagcatttgcttgtctgtaaagtattttatttctccttcacttatgaagcttagtttggctggatatgaaattctgtgttgaaaattcttttctttaagaatgttgaatattggcccccactctcttctggcttgtagagtttctgccgagaggtccactcttagtccgatgggcttccctttgtgggtagtccgacctttctctctggctgcccttaacattttttccttcgtttcaactttggtcaatatgacaattatgtgtcttggagttgctcttctcgagaagtatctttgtggcgttctctgtatttcctgaatctgaatgttggcctgccttgctagattagggaagttctcctggataatatcctgcagagtgttttccaacttggttccattctctccgtcactttcaggtacaccaatcagatgtggatttggtcttttcacatagtcccatatttcttggaggcttttttcaattctttttattcttttttctctaaacttcccttctcgcttcatttcattcatttcatcttctgtcactgataccctttcttccaggtgattgcatcagctcctgaggcttctgcattcttcatgtagttctcaagccttggctttcagctccatcagctcctttaagcacttctctatattggttattctaggtatacatttgtctaaatttttttcaaagtttttaacttctttgcctttggtttgaatttcctcctgtagctgggagtagtttgatcatctgaaggcttcttctctcaactcgtcaaagtcattctccacccagctttgttccattgatggtgaggaactgcgttcctttggaggaagagaggtgctctgctttttagagtttccagtttttctgctgttttttccccatctttgtggttttatctacttttggtctttgacgatggtgatgtacagatgggtttttggtgtggatgtcctttctgtttgttagttttccttctaacagacaggaccctcagctgcaggtctgttggagtttgctagatgtccactccagaccctatttgcttgggtgtcagcagcagtggctgcagaacagctgattttcgtgaaccgcgaatactgctgtctgatcattcttctggaagttttgtctcagaggagtacccagccatgtgaggtgtcagtctgcccctagtggggggtgcctcccagttaggctgctcatggttcaggggtccgggacccacttgaggagtctgtctgcctgttctcagatctccagctgtgtgttgggagaaccactgctctcttcaaagctgtcagacagggatatttaagtctgcagaggttactgctgtcttgtttgtctgtgccctgcccccagaggtggagcctacagaggcaggcaggcctccttgagctgtggtgggctccacccagtttgagcttcccggctgctttgtttacctaaggaagcctgggcaatggcgggtgcccctcccccagcctcgctgctgccttgcagtttgatctcagactgctgtgctagcaatcagcgagactctgtgggcgtaggaccctccgagccaggtgcaggatataatctgctgttgtgcggttatttaagcccgtcggaaaagcgcagtattagggtgggagtgacccgactttccagatgccgtctgtcacccctttctttgactaggaaagggaactccctgaccccttgcacttcctgagtgaggtaatgcctagccctgcttcggctcttccacgctttgctgcccccactgtcctgcgcccactgtctgtcactccctagtgagatgaacccggtacctcggatggaaatgcagaaatcacccgtcttctgcatcactcacgctgggagctgtagaccggagctgttcgtatttggccatcttggctgctcaagattttttttttaaaactgaatcatattccattctatcatacatgtcttcaaggtcttttgttgcatattttatatatagattcataaatgtaattgctgtatttgataattttatttttagttatttgaagtacatttataacataataaaatagtatgtgcatccttgttttccaccaacgatgcacatgggtttcttttttttcttttctttttttttttttgaaatggagtctccctttgtcacccaggctggagctcagtggcacaatcttgactcactgcaacctccgcctcccgggtttcaagcgattctcctgtctcagcctccttagtaactgggattacaggcacgtgccaccacatctggctaatttttgtatttttagtacagatggggtttcaccatgttgatcaggctggtcttgaactcctgacctcaaaatccgcccgcatcagcctcccaaagtgctgggattacaggcgtgagccacctcacttggccaagggttttactgcatcatcaacagattaggtgtttttaaaaaattgatagtggtcatttaaatggatgtgatggattttctttttcgttgtgatttttatgcatttctctataaattagaaattttttgtgtcctttcaaattttttgtttgtgtttttcgatgaaaatgtatttcaattattttcctatttgtaaataaattcattcaaatttatttagttttaaaagtcgtttctattttttgaatattgactcctatcacatgtgatttgtaaatattttcacccattttctaggaggccttatccctctattaaatgtttacttacatatgcagaaatttggaagtgtagtatagttaaatttttgcttttttccttgttgcttatgcatttaatgttgtagctaagaaaatggcgccaagattattgtcatgtgtttcccctatatatttttaaatgatgaagaagttatctggcctggaatggcacctcacacctataatcctagcactttggggggctgagtggggtggatcatgaggtcagaagtttgagaccagcctgaccaatatggtgaaacctcatttctactaaaaatacaaaaaattagccaggcgtggtggtgggtgcgtgtaaacccaggctactcgggaggctgaggaaggagaataacttaaatccaggagacagagattggagtgattggagagcatgccaccacattccatcctgggcaacagaatgagactctgacttcaaaaacaaaaaaagttatcttcttatgtctaattaaaagatttttccacatatggtttaaggaaataaactttattattgtattttttattttttttgagatgaagtctcactctgtcacccaggccagagtgcagtgacacaatctcggctcactgcaacctctgcctcctaggttcaagcgattctcctgtctcagcctcccaagcagctgggactacaggtgtgtgcgaccatgcctggcgaatttttgcatttttagtagagaaggggtttcaccatattggctaggctgatctcaaaaccctgacctcaggtgatccacctgcctaagcctcccagagtgctgggattacatgtgtgagccaccattcctggccttatttgtttgttcttgagatagggtctcactctctcaaccaggctggtttgcagtgttgtgatcatggctcactgcagcctcaacctcccaaacttagaagattctctgattgcagcctctcaggtagctgggttacaagtgtgtagcttcatgtcctcccagtttttttgtatttttggttgagacaaggttttgccgcattgctgaggttggtctcaaacttctgagatccagtgaacaccccactttaacctcccaaagtcctgagattacatttctttttattaagtagtttaattaatttatatttaaaattatttcttaaaatgaaattactagttttattgctattgttttatgtgtttgagtggtatgttttttcttatttactgttttattgccttattttaattgtgtagtgacatgcttcaattattttttaaattttgttttgcatactttctataaatattatcttcataatcctcttgtatattagtctgttttcatgctgctgataaagacatacctgagactgggcaatttacaaaagaaagaggtttattggtcacagtttcatgtgactgaggagtcatcacaatcatggtggaaagtgaaaggcatgtctcacatggtggcagacaaaagaaagagcttgcgcaggaaaactgccttataaagccttctgctttcatgagacttattctctatcatgagaacagcacagaaaacatctgcccccatgattcaattacctcctactgcatccctcccacaacatatgggaattaaagatgagacttgggttgggacatggccaaaccacatcatcttaaaaatggaatttacataaaacatctaaaacttaaaaatatattttaatctcatgacaacttcagttgaatataaaaattatacctctgtatttttcagtttattaatataaaaattattttgtgtattaacatttatgcagatttttattgttttaaatattctacagaagagctttaagggttttatgcatcatcattatgatagtaaagatttctacatttgtatatttacattcaatagagagctttatttttatatatggttttatgatgctgtccagtattattttatttttaaataaaattgactcattttagcatttctttgttgttgttgttgttgttgttgttgagatggagtcttgctctgtcacccaggctggagtgcagcgggacaatctcagctccctgcaagctctgcctcccgggttcacgccattttcctgcctcagcctcctgagtacctggaactatacgcggctgccaccatgcctggctaattttgttttttttgtgtatttttaatagagacggggtttctccatgttaaccaggatggtctcaatctcctgacctcccgtttcttttttttatatgcaaactctcgctgtattattcaggctgatctgaatctcctggtctttagtgttgtgacagctttggcctcttaaaactgcaggattacaggcatgagccacagtgcctggccatcatgtagcatttttttgtagaactgtgctagtggtgatgaactccctcaacttttattttggagatttttagttttcatcctatttttaaagggaaataaatttaaatcaaatattcttggttacaatttttgtttgtttgttttactacatcaaaatttgggaaattctcaccttttatcttcaagtaaccactgtattgtttttttttccccatattcttcttctaagattaccttaatgaatatattgatctacttgatggtgtctaataagttttacattccatgttttaattttgttttgcaattttatatttttgtgttatatattctagcatatgccaccatacatctgatatttgtgttttgattttttagtatatatcataattgtgcatgacaatatttaactttgtacaatttaagaccctgtggagcaaaatcaaatatgaatcagccatatgtctttttccagtagaattatatctgtttgtttgcctgtataaatgttatcttttttaaattttttttttgagacagagttttgctcttcttgaccaggctggagtgcagtggcacgatcttggctcactgcaacctccgccttccaggttcaagtgattttcctgcctcagcctcccaattagctgggattacaggcgcccactaccaagcctggataattattgtatttttagtagagacagagtttaccatgttggccgggctggtcttgaactcctgacctcatgatccaccctcttcagcctcccaaagtgctgggattacaggtgtgagccaccacaccaggctacccttggtttttttttgtttgttttttgtatatttgttgtataggtttgttgtgaatggttttctaatcctttgtagatgagtagttataaaattcttgtaatttcaacatcctatttatgaatctatatgatttttgtgtgggagaaacacttttggatttgaatataatttaaaactcccataactctgtatctcttttgggtattattatttttacttgtcaaaaaaataacaaatttaccacaaaatatttttaaatattcagttaagtcacactaattatcttgacattgtcatgcaacatattgctagaatgtttttatcttgcaaagctaaatcttaatacatactgactaccacttttttcttgttttttttcttttttgaggtggagtcttgctctgtcacccaggctgaagtgcagtggcaccatctcagctcagtgcaacctccacctcctaggttcaattgattctcatgcctcagcctccttagtagctcagattacaggtgaccgccatcatgcctggctaatttttgtatttttattagagatggggtttcaccatcttggccaggctggttttaaactcctgaccttaggtgatccacccgcttgggtctctcaaagtgctcagattacaggtgtgaaccaccatgcctggccccaattttttctgttttatggcactttgcaaacgccagtctgttctttgtttctaagagtgtaactccttcatatatttcatacaatctgtcgttttgtggctggctcatttcattttacataatgccatcaacatttatctttatagttcgtacaatatttcctgctttttgaagactgagtgatatttcagaatttttatatttcaaattatatctactgaatgatttggtgaaagaaatctgccttgcttttacctattggcttacagtaacaatgctgcaataattatcactatgtaaatgactccttatatgaccatgtatgtgaaagtttatatatgtgctgcattctattttattagtctactttttcacctttatactcataccaaattgttttaattctgtagctttgtagtgtgatttaatcaagaactttaatgcctccagcattgttccttttattttttgaagattgttgggtactttattgtctcttgagattctatatacttttggggttgctgttcctgtttcttcaaaaatgcagtgagaaatttgaaaaacattcattaagtctgtctgttgcattgagctggatggaccttttcagaatattaattatttcaacctttgtttaaaagcacactcaagggtgtgttgtttaatttctatgtatttgtaaatttttcagtttttctgtcttattgttttatactcgtactccattttactcatagaaagtagttcatagaagtttacttttaaaaagtttggtaagacttcctttttggcttaagatgtggtttatcaagtaaaatgtatgagctattgagaaagaggtgtattctgatgttgtcgaggagtgttctccataactctgtttggaataattgttttatactgcctttaagtagtctgttcccttattaacattctttcttgttttatttttattacagaaagtgtggtattaaaatatcttgctataattgtattgctttgtatgtgtttcttccattctgtcaatatttgctttatatatttggaaccctaatgtgagacacacacacacacacctgcgtgcgtgcacaaacacatacacacacacacacaaatatacacaaatttttcataggttcccagtgaatgaatctattattttttgatgtcctttgtttctttggagtttaaatttaaagtacattttataaaatattataatttttgacttaagatgtagcttgtgtaagattattttgactgtttctgctctcatttgattaatatttgcatggaatgtctactttcttcctgcctcttccagtctttttttatcattagatttcaactgactcttgtagaaaggcaagatgaatctcagtttttaaaatattttaataaaactatttattgaaaatatgtctcaatttaaaagttaattttatatatattgaaataattttctgaaatagaaagacttactgttattttattaagtattttatttgattcttgcatctttgtcttttattctctttccatctttctttgtgtctttttgatatttgtattgataggctttgacttattttgttttgtgtatttatacaaatatttttgtggtacattggggattacatataacctctaaaagatacaacaacatattttaatctggtaaataaacttaagttgcgtacaaaaatttgttcttattataccttccctcaaatttgtcattgatgttgttaattatatctttttatattgtatattcattaatgaatatttaaaatgttttctatgcttttatccttcaaatttcagagaataattaaaaatgttttctgcaccactagggtaatgctaagaaatttgacttttgtgtatttgcatatttttcccagaaaatcatgtatttttatatgattctgtgtttttattggaatcatgttattttcagtagaaggaactcttttcagcaccttttatatgtagggcatatgcatttccaatatacttttttagaatttggttactttggaaggtttttactttttttatttggcaggacagatttgctgatggtattattctcaattaattaaaccttttttttttccacaatttttgtcatgactacatcacacagttcccttatggcctgcaaaatttttgttaacagttcactgactatctcataagattatgtttgtaaatggcacatcactttttttctttttcttttttttttttggaaacaagagtctcactgtatcctccagccaggcttgagtgtagtggtgtgacctgagctcactgcaagctccacttcctgggttcaagtggttccccttcctgggttcagcctcagcctcctgagtagctgggattacaggcatgcaccaccatgcctggctaatttttatagttttagtagagacggggttttgccatgttggtcaggttggtcttgaactcctgacctcaggtgatcggcccaccttggcctcccaaagtgcctggattacaggtgtgagccactgtgcctgacctggcacatcagttttatctggcagcttcaaaggtaatctttttgtctgtgacttttgaaattgtgcttatgtatgtgtttgttataaatatctttttgttattctagtttgtttgttgagcttttttatttttacatctttttttttttttttacttttaggatctgtcagtttttttgtgtatattttatctccacaatttgttttttgatatcttaactattttttattcttgtcctcatttttctgattttccatagttgtttctgttcccattttaatcagtattattcagtttattaccaattattaaaattaatgtatacatcttttttatgatttctttcagaaaattttgtgatatttttggtgggattgtattgccctattttgtatatattataatccttgattaagatttagacattaaaaaaagctacttgtcaaaatcttataatgtagctttgtcatggcatattctgaaaacaattgtctttgctggtgattatgagagtttcttaaacatattcttaggatatgtgttgtctgaaattttatttttattatttaattaggagagattactcgttaatttgtagcgtcatcacttgctacaccttttccatttctgtggtactgcagtctctctgctgctgtaacatttttctttggtctcagcagactcaaactctcattccaaaatataccaccatttctttcagtactttatgtcatgagagacagaaaccagtgtcaggaaaaaaccctaaaagccagaaatggcaatgattgtgccggtattttacctttcttttaaaacagaaaccaagagttggcaatttacttgtaaagacactatggtatagtgggaaacaggaaaagatgtattgagtaaatttaacagacttttctttttcttctttgtgtttttttgcattgtgctcacctgggacactgcacacacttaaatcatttatgaattttccacagatgtattttggtctgaatgtttttgttacatttatgtctatgaaagaattagagcctgtggtattttgcaatgctatcttgtctatgtagtttgtataattttataggtaagatttttaaactatattcatgtgagtctagtaagtggagtaatttatttatttttatttttttttcaggtatgtgtcctcattttgctcaagacctttggccagagcagggcatggaagattcttttcaaaaagcaatactgagaagatatggaaaatatggacatgagaatttacagttaagaaaaggctgtaaaagtgtggatgagtataaggtgaacaaagaaggttataatggacttaaccagtgtttcacaactgcccagagcaaagtatttcaatgtgataaatatttgaaagtcttctataaatttttaaattcaaacagacctaagataagacatactgaaaagaaatctttcaaatgtaaaaaacgtgtcaaattattttgcatgctttcacataaaacccaacacaaaagcatttatcatagagagaagtcctacaaatgtaaagaatgtggaaaaacctttaattggtcctcaacccttactaatcataggaaaatttatactgaagagaaaccttacaaatgtgaagaatataacaaatctcctaagcaactctcaacccttactacacatgaaataattcatgctggagagaaactctacaaatgtgaagaatgtggtgaagcttttaatcgatcctcaaatcttactacacataagataattcatactggagagaaaccttacaagtgtgaagaatgtggcaaagcatttatctggtcctcaacccttactgagcataagaaaattcatactagaaagaaaccctacaagtgtgaagaatgtggcaaagcatttatatggtcctcaacactaactagacataagaggatgcacactggagagaaaccctacaaatgtgaagaatgtggcaaagcttttagccagtcctcaacccttactacacataagataattcatactggagagaaacgctacaaatgcttagaatgtggcaaagcttttaagcaactctcaactcttactacacataaaataattcatgttggagagaaactctacaaatgtgaagaatgcggcaaaggttttaatcgatcttcaaatcttactacacataagataattcatactggagagaaaccttacaagtgtgaagaatgtggcaaagcatttatctggtcctcaacccttactaaacataagagaattcatactagagagaaaccctacaaatgtgaagaatgtggcaaggcatttatatggtcctcaaccctaactagacataagaggatgcacactggagagaaaccctacaaatgtgaagaatgtggcaaatcttttagccaatcctcaacccttactacacataagataattcatactggagagaaaccctacaaatgtgaagaatgtggcaaagcctttaactggtcctcaactcttactaaacataagataattcatactgaagagaaaccctacaaatgtgaaaaatgtggcaaagcctttaagcagtcttcaatccttactaaccataagagaattcatactggagagaaaccctataaatgtgaagaatgtggcaaatcttttaaccggtcttcaacttttactaaacataaggtaattcatactggagtaaaaccctacaaatgtgaagaatgtggcaaagcatttttctggtcctcaaccctaactaaacataagagaattcatactggagagcaaccctacaaatgggaaaaatttggcaaagcctttaatcggtcctcgcacctcaccacagataagataactcattggagagaaatcttacaagtatgaataatgtgccaaagcctaagaaaaccctcaattcttaatagatataagattattcctactggagagaaactacaaacctgagagaggcgctaatgcttttgacagtacctaaaactttaaagaaaatcattctgctgaaaaatcctagaaatgtgaagaatgtgaaaaagcctttaaatgattgtcacacttgattgtaggtaagataattcatactggagaaaactaccagtgtgaacaacgtggccaagcttcgacaatgctcacaccctattgcacaggaaagcatttatacttgagaagaaatgtacaaatattggcaaagtaaaaaatccattaacacctgctcacatcttactcaaaattgtagagttcatagtaaataaaagcattaaaattctaattactctcagaagatctgtcagaaagtatgtctttaaagtatagaagagcatttattttgaaaaaaacattacacatatgaagaggattgtaatatctttacttgtaccacagatcttattgtacacattttatactagagaaaaaccctcaggcagttgttaaaattttgttgaacatcagggagtttaagaaaaccctgcaagtataatgaatttggaaaaacattttttcaaaaactacaaattataaaacaccaaagtgttcatactaaaatatatttttgcagatacattaaatatgaaagatattcaatccaaaattaagtctatgtaaatatcagggaataattcacagtagaaatatctagggcattcaagctttagacattacactaaatcagagtgctgagtatagaaaataatacaaacagatttgtctaaacatttgtatataactttaaaaatagaatattttttggagggttataattacattcaaagtacttttttttgaaaatacagattttttttaaaagtgaataatgtgttcaactcttaaattcatgctgtttcatcattgctggtgtattcatatgtgaaagcatgtgactaattgttgctgcataaaagatatgagattcttttttattaggcattatttatgaccttttctatgaaaagataaggacattaaaatgtaagatgcgtgaggaaaatttaggtagagaggctctttgtggttaacttataatattgagtgatgcatgaggtaggtgttcagaataatattcctctgcattattatgaatgaaaagcattcttaattttagttaaaattaagttagtcatatgttattttattaattgtacttctatgaaataatatgcagtctatttttaaattataaattatgtgtgaacttagcttttcaattcaacatttttaacatattaaatactattgtgaattcaatgaagtgttcttatgccactaactttaacctattcccttactcaaggatgtaggtaaaagatggtaacaatacactatttggtaagataatgtactgacatctctagcaatcttttttgccagtggctttaaattgccaataagttaaagaatattgttcctatgggttaaatttttattcttattttcacatttaaatttatttttcttaatttttgtggatacataatatgtgtatatatgtatgccatatatggtatattttgatgcaggcatactctatataataatcacattagaggaaatgagatatccattacctctagcatttattctttttattacaagcaattcaattgtacacttttagttatttttaaatttacaatgttattgattacagggtcatttttatggtcataataaaaaattttatacaaacgtgtaaaatctatacatttctgagttctgaataaatatttttaaaaattttaatatatttttctttgaatatgtgacctttgcctgcaagcacatatggactcttagaattgatttacataaaattaaatatatacttctattaaagataaaccttaggtgtaaataaattatggagtaagtatgtttgtgtgagtataagtttgaaactatttttagcagcaaaaagaaatactcgaacaaaataaattattttaataaggtgtctaatttactagaaaacaaaaattttcaaaaatgctgaaaccaaatctatgctatttgctttgtattgaatttattactgtacagtctttgtgcttatgattcagaatctccgcatgcaaattctgtgttttaacttgactgatactcatgctagactcataactttctttgtttgttaattgtttgtttatttatttatttttgagacggagtcctgctctgtcacccaggctgaagttcaatagtgtgatcttggctcactgtaacctctgccttttaggttcaagcaattctcctgcctcagcctcccaagttgctgggactacaggtgcccaccaccatacccagctaatttttgtatttttagtagagatgaggtttcaccatgttggtcaggctggtcttcaactgaccttaggtgatccacccaccttggcctctgaaagtgctgggattacaggcgtgagccaccacgcccagcctgtgtaatagtctttgaagtattcattatgtgagctggtctgtaattataagaatatttttttttaattttattgttccataagctattggggtacacatggtgtttggttagatgagtaagttcttaagtggtgatccgtgagatcctggtgcacccatcatccaagcaggatacacttcaccatataagttgtcttttatccctccccactcccactcttcccctcaagtccccaaagttcattgtataattcttgtgcttttgtgtcctcatagcgtatttcccacatatcagtgagaacatatgatgtttggttttccattcctgagttacttcacttagaataacagtctccagtctcatccaggtcattgcaaatgctgttaattcattcctttttgtggctgagtagtattcctgtgtgtgtgtgtgtgtgtgtgtgtgtgtgtgtgtgtgtgtgtatccactcgttgattgatgggcatttcacttggttctatgattttttagttgtgaattgtgctgctagaaacatgtatgtgcaagtatctttttcaaataattactagtttttcttggatagatacccagtagtgggattgctggatcaaatggtagttctacttttagttctttaaggaatatccacactgtttttcatagcagctgtactagtttacattcccaccagcagtgtagaagttgtttgaaatgtttgttcctcagtgccataaagaaatagcacttgaacataaatttaacttatttagtaaggccatttttacttcctgcagaaagtatacactcgtcagcagttttgccacgagagtacaatgaataaaggagacagggtcatttataacctgacgcatccaccctactgctgtgtccggtttccattggctagaatgggacctcacattctgtatttatcccaattggctagcatcttagaactttttaaaagaggcaaaggtaaaggagaacaaagaaaggagtaagtaacttgtgggatgctgagaaaggtaaaaccacttttaaataaggaagaggagcaggctatgacctaatgcttgcttggaccagtataagcatgccagggcaaatatttaggagcacaggtctttgaataaattttgtctctaagaaaagttacaatttattcctaattagatggggggggggaatctttgaagaggaacctctactttactttttacaaagtgttccctaatcaccacatccatgccaacatctacagttttttgatcttttgattatgaccattcttgcaagaataaggtggtattgcattgtggttttgattttcatttccccgatcattagggatgttgagcattttttcttatgtttgttgtccatttgtatatcttctttagaaaattgtctattcatgtccttagcacagtttttgatgtttttttttttcttactgatttgtttgagttccttgtagattctggatattagtcctttatcagatgtatagattgtgaagatttcctcccactctgtgagttgtctgtttactctgcttactgttcctcttgccatgcaaaagctctttaattaggtcccagctatttatctttgtttatactgcatttgcttttgggtttttggtcatgaaatttttgcctagccagtgcctggaagggtttttccattgttatcttccagaatttttagagtttcaggtcttaggtttaagtccttaatccatcttgagttgattttttttataaggtgagagataaggatctggttttattctcctacatgtggctaccatcccagcaccaattgttgaaaagggtgtcttttccccactttatgtttttgtttacttttttgaagatcacttggctgtaattatttcagtttatttctgggttctctgccattggtctatgtgtctatttttataccagtaccacgctgttttggtgactatggttttatagtatagtttgaaatcaggtagtgtggtgcctccagacttgttctttttgcttagtctttctttggctctgtgggctcttttttggttccatatggtttttagaattttttttttctaactctgtgaagaatgatggtagtattttgatgggaattgtgctgaatttgtagattgcttttggcagtagggtcattttcaaaatattgattctacccatccttgagcatgggatgtgtttccatttgtttgtgtcatctatgatttctttcagtagtgtttggtagttttccttttagaggtcttttgactccttcattaggtgtattcctaacttttttttgtttttttccagctattgtaaaaggggagttcttgatttaattctccatttggttgctgttggtgaataaaagagctactgatttgtgtacattaatcttgtatccagaaactgctgaattctttgattggttgtaggagccttctggaggagtccgtagggttttcaaggtaaattatcatatcatcagcaaacagggacagtttgacttcttgtttactgacttggatgccctttatttctttctctgttctgatagctctggaggacgtccaggaatattttggagaggagtggtgagagtgggcatcctagtctttttcccattctcagagagaatgctttcaacttttcctcattcagtattatgttggctatgggtttgttgtagacagcttttattaaattaagctgttccttgtatgccaactttgctgagagttgttttttttttttttttttttttttttttttttttttttaacagagttttgctcttgttgcccaggctggagtgcaatggcaggatcttggctcaccacaacctccgcctcccgggttcaaacgattctcctgtgttagcctcccaagtagctgagattacaggcacatgtcaccatgcctggctaatttttgtacttttagtagagatgaggtttcatcatattggtcagactggtcttgaactcctgacctcaggtgatctgcctgacttagcctcccaaagtgctgggattacaggcatgagccaccatgtgcccggccaagctgagagttttactttcaaagggatgctggattttgtcaaatgctttttctgcgtctattgagatgatcatgtgatttttgttttcaattctatttatgtggtgtatcacatttgttgacttgtgtgtcaaaccatccctgcatccctggtatgaaacccactttatcatagtggattatctttttgacatgttgttggattcagttagctagtattttttttaaggattttagcatcaatgtttgtcaaggatatttgcctgcagttttctttcttagttgtgtcttttcctgattttgatactagggtgatgctggcttcatagaatgaattagggagggctccttctttctctatctggtggaatagtgtcaaaaagattggtaccagttctttgaatgtctggtagaattctgtgaatccgtctggtcctggacattttattggtaattttttgaattaccattttaatctcactgcttgttattggtctgttcagggtatctaattcttcctgatttaagctaggagggttgtatttttacaggaatttattcttctcttctaggttttctagtttatgtgtgtaaaggtgttcatagtagccttgaatgatttttttgtatttcagtggtgtcagttataatatttcctgtttcatttctcagtgaggttatttggattttctctcttttcttggttaatcttgctaatggtctataaattttatttatattttcaaagaagcagctttttgtttcatttaccttttgtattttttttgtttcagttagttctgctctgatcttggttattttctttttttgctgggtttgggtttggtttgttcttgtttctctagtttcttgtggtgtgtccttagattttctgtttgtactctttcagactttttgatgtaggcatttagggctatgaactttcctgttagcaccaccttagctgtatgccagaggttttgataggttgtgtcattattgtcattctgtttgaagaattttttaattttcatattgatttggtttttgccccaatggttattcaggagcagcttatttaatttccatatatttgcgtggctttgaagttttctttgggagttgatgtccagttttattccactgtggtctgagagagtgcttgatatagtttcagttttcttaaatgttttgaggctcgtattatgacctatcatatgatctgtcttggagaaagttccatgtgctgttgaggagaatgtgtgttctgcagttgttgaatgaaatgttttgtatatatctgttaagtccatttttttccaaggtatggtttaaatccactctttctttgtcgactttctgtcttgatggcctgtctagtgctgtcagtggagttgaagttccccactattatagtgttgctgtctatctcatttcttaggtctattagcaattgtttttataaatttgggtcctccagtattaggtggatatatctttagggttgggatgttttcctgttggaccagccatttactgttatataatgtccctctttgtctcttttaaccaccgttgctttaaagtttgttttgtctgatataagaatagctgcccctgcttgtttttggtgtccatttgcatgaaacgcctttttccacccctttactttaagtttatgtgagtccttatgtgttaggtgagtctcctgaagatagcagatagttgattggttagttcttatccattctgcagttctgtatcttttagtggagcatttaggccatttacattcaatgttactattgaaatgtgaggtgccattgcattcattatgctctttgttgcctgcatactttggtgttttttttgttttgtgtttttttttttctgttttttgtttgtttgtttgtttttgagatggaatctcactctgtcacccaggctggagtgcagtggcgccatcttggttcactgcaacctccccctcccaggttcaagcgattcccctgcctcagcctcccaggtagctgggagtagaggtgcccaccaccacgcgtggctaatttttgtgtatttagtagagacggggatgcaccatattggccaggctggtcttgaactcctgaccttgtgatctgcccgccttggcctcccaaagtgctgagattacaggcatgagccaccacacctggcctttttttttggtttttcatttttgttttttatcttgtatttgtgttttataaatcctgtttgatttatgctgtaaagagattctgtttggttgtgttttcaggatttgttttatgatttaaggtttcttttggcatttttgtattaggggcttgttaatggtgaattctctcagcatttgtttgtctgaaaatgactgtatctttccttatatataatgcttagtttcactggatgcaaaattcttgactgataattgttttgtttgaggaggctgtaggtggggccccaatcccttctaacttgtaaggtttctgctgagaaatctgctgttaatctgataggtgttcctttataggttacctggttcttctgtctcacagctcttaagatttttttgtcttaactttggataacctgatcacaatgtgctaaggtgaagatctttttgctatgaatttcccaggtgttcttcgtgcttcttatatttgtatgtctaggtaaggccagagaagttttacttgattattccctcaaatatgttttccaagcttttagaattgttttcttcctcaggaacaccaattattcttaggtttggtcatttaacataattccagacttcctggaggctttgtttatattttcttattctgttttgtcttcgttggattgggttaattcaaataccttgtctttgagctcagaatttcttcttctacttgttaatttttattgctgagaatttcctgatcatttcacatttctaaaagtgtgtccaatgtttcctgaattttttttttaagctatctgtttcattgaatattttgcccttcacttcttgtgtgattttttgtatttccttgtgttgggctttgcctttctcccatctctccctgattagcttaataactaacctcctgactccttttttttcagataaatcagggatttcttcttggtttggttctgttgctggtgaactagtgtaatttttttggggggtgttgatgaacgttgttttgtcatattaccaggtttgcttttctgttccttctcatttgggtaggctttgtcagagggaaggtctatggctgaaaactgtttagattttttgacccacagggtattccctttttctgtggatgtggctttccatgagctgaactgtagtgattggtgtctctcttctgggtctagccacccagtgagtcttccctgctccaggctgatacttggggttgtctgcacagagtcctgtgatgtaaatcgactgtggatctctcagccatggataccagtgcctgttccagtggaggtggtgaagggtgcagtggcctctgtgggagtccttagttttgatggtttaatgctttatgtatgtatttatttttgctagtgggcctcctgccagtaggtagcacttctagaaagcatcagctgtagtagtgtgcagagggactggtggtgggtggggccttaggactcccaacattatatgtcctttgtcttcccctaccagggcagatagggaaggaccattgggtgcagggggcactggtcgtgtctgagttcagactctccttgggcaggtcttgctgtggttggtgtaggggatgcaggtgagagtcccaggtcactggagttgtgtacctaggagaattatagctgtctctgctgagccacacagagtgtcaaggaagtgggggaaagcgagtagtcacaggcctcactcagctcccatgcaaaccagagggccattctcactcccactgtgtactccacaacaaccccaagtctgtttccagatggaaggctagttgggcttgaaaattgctcaaggctttctgccttccagttgcaggaaaaaaaagggctttagttcttccccgcctgtgaagtctgcaagccagattcgcgcctttccctgagttctgggcaggaggcttcttggcccgttcaaattgttacaaagttcagctaaggaagtctttttccacttggaattttacctctgctcctctgtcctccctcctgaaggatccctgtggtgccaggcaggaatgggctgcttggggatttatcaagcccccagggcctccctgctgcctgctccacccctgtatttcactcagcttggctctaatttgatgcagctccaggtagtcaggaaattatcccacaaacagactttcagcttctccagtgggggtgcgtgtttgggagaggagggtctccctttctcacttctgcatttggggcactcacagtatttggagtgtctccagggtcctgcagtagcagtctgcttccttcagagggtctgtcctgatgcctttaaagacacattctcaagattctcagataagtgtgtcccaggtaaaaacagtgtccacattttcttttagaatgtcatgtgtttagaattgcagtcatttacatttctacttctgatgcttttgcctaagaagattatttcaactacctttccccttttcttctcatgacagtgaaaggacttctttaaaataattctcccctatatatcagagacttgtctttattctctccatccaggcttcttacatatcacaaataatactcatcttgagtttatatgctgaaatattggaagtattccctatgttgacaggtcagcctgggcaggtgggaatataaaacattcttattggggatggtgctgggtcctcagatatcagtgagggagaaaagtgcactgtttaggttccatctgaatgctccatcagctctatgaagaatataatttttaaatgcacacttaaaaaggatggaattggccaggtgtggtggctcatgcctgtgatcctagcagtttgggaggccgaggcgggtggatcacgaggtcaggagatcgagaccatcctggccaacatggtgaaaccccatttctgctaaaaataaaaaattagctgggcttgttggcatgtacctgtaactccagctactcaaaagactgaggcaggagaatcacttgaaactgaaagaggttgcagtgagatgagaagatgagatcacgccactgcaatccagcctggtgacagagcaagactctatctcaaaacaaaacaaaaggatagaattaggctgggcacggtggctcacacttgtaatcccagcactttgggtggccaaagtgggtggatcatgatgtcaggagttcaagaccagcttgagcagcatggtgaaaccctgtatctactaaaaacacacacacaagcaataaatctggaaaacattttccagttaaaaacacacacacacacacacacacacacacacacaaaattagctgggcaaggtggtgtgtacctgtagtcctagctacttgggagacaggcaggagaattacttgaacccaggaggcagaagttgccttgagccaagattgtgccattacacaccagcctgtgtgacagagtagactccatcccccccccaaaaaagaaaaagaatgggtagcctggaataattagaaagatatgcaaaggaagtaattcaaagaaatgtgacttctagaatgctacagagagtatttaaatacactattagaaattacaaaacatgggcaacatgtggcttgaactttacataaaacatgtttttcataattagattctgattctgatttacattttttggccagtaatttcaccgaagtcatgttgcatcatcctatatgtatcagcacataataccaatctgtcccattaattttattcacttggttaatgtgttttctgaaagacttcttcccccttccccgagatggagtcttgctctgtcatccagagctggagtgcaatggcacggtctcagctcactgcaacctctgcctcctgggttcaagtggttctcctgcctcagcctcctgagtagctgggattacaggcatgagacaccacgctcagctaattattgtatttttagtaaagatggggttcaccatgttggccaggctggtcttgaacttttgacatcatgatccctctgccttggcctcccaatgtgcaggcattacaggtgtgagccaccactcccagccaggatttcttcactctaaagttactttataaaaactgtattattcacaattactttggagagactttctgattaatgtgaataaacacatttaatctgaaatctcccctgttacaccaagtatcaggttccagtccaagctgaggtctgacgggagtcggtgggtgagtggtgggttgctggaaaaacaatcgaggattggtggggagttttggcatggctttattctctctatggtcacaagcctggtcatgagccctgtgtacagggtcagcagctttactctctctccctctcctgtccacctttctgtgtactcctaacacataatagtggctgagagccaagtatgatcttacacaaccaggttacataatgagtagaattgtgcatgtgtgctccaaactcactgagtcatgctgaaccagatgtttacctcggcctattcttgaccacagcacatccatttttcttacattccttttcttaatagtttatctttgtttatacgttgctttggaaaatgaagtgtgtcatcttttttttactggtcatatacagtgggataaaacccaggttcagtcacttactatatgttttaaaaagtattttccttaagctagaatcattgacatcattggtcagtttgttagcaatgcagtaactcaggtctcatcccagatctgttgagttagaatacatattttaacaaaatctccagtttattgatgtatgcattaaaatttgagaggtaatttctaatgtcctgtgacttctccatatgggaactatacacagtttactctgtataatgtaaatatagcactcaaaactgtatatgcttgtgtttgtgccatacattttatgctgtatcatcagaaaagtatagtacctacactggttttgtggatcttattctctttcctcagaatgatggaatacattagagaagctttctctattaaataatattttactggataatttcagtctcatgtaaaacagagccagttctcttaactctcaaacacctagagtaaaattaaccattctgcctatggccactttctaaatatgtgtgggtgtttggggttttttagaagatgttaatattcaaggctgtggccatagaattctctcaggagtagtgggtgtgtctgaatcctgctcagtgaaatttatatagagatgcggtgttagagaactacagaaacctgctttctttaggtgagagtaatttttccccagatttcctaatataccttaaagcttctattttatccctttgtagaatgattttgggaatttttgctatgcataaattatttttagatcaataaaattaaggaaaacttgaagttattggaatagaaaagaaaattttcaagatgttatatcttaacaggaaacttcccctttcttgagctaaactgtatctttcactctagattaatgataattctagaaattcagtggcataaagtattttccccaagtattaaaatccaatattcatcaccaattttaaattcaatagtattgaacagtagagctaaggatccagaaaactaaaatacatattaaatattttaacctaaatattctaaaggttctgtcagaaaacagtattttggaattaaaattctagaatccttcataatattctctcctctctactgaacagagtactaggttggtaactggagaatcccagcaagtcatattacttttttttctaacaaaacaggccttgatgtctctaacattgatctgatctcctgctttaagcaaataaaagagccctggaatgtgaagagatatgagacagtagtcaaatactcagatagctaagcatgaatgaggcagataacaaagacaagaggtacaaaggtcaaagaattccagaccttaaaatgtggtatgtgttgctctgcttcaatggaaatatttcctagaaagtcatttttttttctagctctcaaataggagcatcttttgttccatacccttaaattctctaagggctccacttcctacttagtgattttcctttgagggtcttgtgagagctaaggtcctctttatggcttatgaggtatcacatgttattcctgttgttccattgctttggggggatataagaacgcctcttgattatttttgagcagctgcatataagattatttcttaagttttcttttcccatcatgtctgaaatgtgtgagagcagtggtgatattaagatttgtttcagaaatcttaggaacattaatgacagatgttacttgttatttttctattttttcattttgatattagcaatcctaacagatttgaaatggtagttcctcattgttttcatttgcaattgcctgttggtaggtgatattgaacacgtttttatatatctattggttatttgtatatgttggcaaaatattttttcagtcttttgaccatttttcaggtggattgtaattgtttttattatacttgcctctactttgaatttcctatatatttttaatattaaacttttcttgtatatattgtttgctattgtgagcatgctgcagtaaacatgcaagtataggtagcattttttttttttttttgagtcggagtcttgttctgtcgcccaggctggagtgcagtggctcgatcttggctcgctgcaggctccaactcccaggttcacaccattctcttgcctcagcctcccgagtagctgggactacagacgcccgccaccatgcccggctaatgttttgtatttttagtagagatggggtttcaccgtgttggccagggtggtctcgatctcctgagctcatgatccgcccacgttggcctcccaaagtgctgggattacaggcgtgaaccaccgcacctggcccagatatcattttcatataataaatgatttttctttgggtagatacccaatgatgagatctctgaatcaaatggtagctctatttttagttgagattgagtttttttttttcatatgcatgttggctatttgtattctttattgaaaaatgcttagtaatgttatttgcctattttcaatggaatcctttttttattattatgacatttttgagttgtttgaattatttgtaaattctgaatattagttacatgttggcacatagttcgcaaatatgttcttttattctgtaggttgcctatttaccctgttgattatttttcttgctgtgcctaaacattttagtttgaatcccatttatctattttttataataataacataataatagttttttttgttgtgttcttgactagttttggtgtcaaggtgatacctcagagtgacttaggaagaatttcattatcctgaatttttgggaagagtttcaggaggattattattcttagtgcatttggtagaatttggctgtccatttatctactcccgagcttttctttttcaagactttttttattactgcctcaatcatgctactcattattggtttgtgttactgttgtatccattgaaatgtctgttctttcacttctgattgtttatttagatctgtcttctgcttttggttaagctagctagcagtttatcaattttgtctttttgaaaaatcaactattctgttgatcatttttattgtttttggtcttaaattcatttggttctgttctgatttttgtttttttttttcttgtaacttggaatttggtttgttattaattttctagttccttgaagtgtgatgtcaagtccttaatatgtaagctttctacttttttgatgcaggcatttaggctataaactgctctctttgtactatatttgcatatctcacaggttttattatattgcatttctatttccatcttttttcccacaatttttaaattttcattttaattttctttttgagatgggttttactctgtcacccaggctggagtgtagtagcacaatcttggctcactgcaacctctgccttccaggctaaagcgatctttttatttcagcctcccgagtggctaagactataggtgtgcaccaccacatttagcttttttaatatgtattttttgtagagatggggtttgccatgttgcccaggctagtctcaaactcctgacctcaggggatccacctgcctcagcctcccaaagtgctgggattgcagctgtgagccaccacccctggccggccatcttaattacttcatttacaccgtgactgttcaggagtatgttgtttaaattctttgtaaatttatagtttctgaaatttctcttgatattgatttgtagttttattctcctgtgatctaagtaggtagttgatataattgtgatttatgggggtactttgttgatttgccaatttcctatctcaatggtctctctgatgctgtgagtagaatgttgaatttctccactatcattgtgttactatctctttctataggtttaataatatttctatttaaaatctgggtgctttgatgttgggtgcatagatatttagaattgttatatctttttgctgaaaagatttctttattattggatgattaccttctttaccctttttgttgcactttttatttaaagtgttttatttgatatacatacagatactcctgtttgcttttggtttctgtttctgttgatatctttcctcccttatttttaatctatatgtgtcttacaagtaaggtgagattcttgtaggcaccatagagttggacgattttttcttattcatatcataaatctatacattttgatgaaggatttaattaatttatattcaaggttaattttttctttctttttctttttattttttgagatggagtctcattcttgttgctcaggttggagtgcaatggtgcgatctcggctcactgccacctctgcctcccaagttcaagtgattctcctgcctcagcctattgagtagcggtgattacaagtgcccaccaccgtgcccagctaattttttgtatttttagtagcgatgggttttcacagtgttggccaggctggtctcaaactcctgatctcaggtgatccaccctctttggcctccaaaaggtatgagccacctcacccggccatggttaatattaatattaacatgtaggttttgttactatcataatgttaattattttgttttttttttcatctatctttctggtttaataaaattctgtcatgttgtgatttgatttatttctttttgtcttttgttttataagacctgttagttttatacttttgtatgttttaatgatggtgaatatcaatcttttgtttttctattagaagtaccggcctggcacaatggctcatgcctgaaatctcagcactttgggagactgaggtgggttgatcacctgaggtcaggagtttgagactagcctggccaacatggtgaaactccgtctctactaaaaattcaaaaattagctgggtgaggtggcgggtgcctgtactttcagctacttgggaggctgaggcaggagaatcacttgaacctggaaggcagaggttgcagtgagccgagattgtgccattgcactccagcctgggcaacaagagcaaaactgtctcagaaaaaaaaaaaaaaaaaaaaaaaagaaatccctgacatcttttatagacccagtctagtggtaattagtttccccagcatttatttgtcagggtaagactatttcttcttcatttgtgaaggttaatttaccttgatgtaaaatttttggctggcacttttatttcaacactctctaagtgccattccattatcttctggccagtaaagtttctgttgagaagtgtgcttttagtctgatgtggttttctttataaatgactagatgcttttcttttgctgattttataattagttatttcatttcgactttagaaattctggttatcatgtgccatgatgaagtctgttttgcaatttattttactggtgattgctgagcttcctgtatatgtatgtctaattctattgctagacttggaaatttttcatcatttattttcttaaataggttttctaaactttttcatgtttttttctttctaagaaacactgataatttttatgtttagtcactttatgtagtcagaaacatctcaaagttttcgttcgttttttaaaattcttcttagttttgtctgagtagattattttaaaagacccatttaaaggtctgaaaattctgtttatgccttttcagtctactattggatcattgaatgtattttctttttccttcagtaaatctttcagttccataattttgttttggtttcttttaaaagatatttatctccttggcacatttcccattcatactctaaatttatttatttatttttgtattggtttttagatttcttttgcatctctttgagcttctttaaaatctatattttgaagccttctaaaagtcttttaaagtcctttcaattattttttttttcttggaatactggagaattattgtgttcctttgaaagtgtcataaaccttgcttttctgtgttttctctgtctttatgtgtctttatattgatttctgcacatctggagaaacagttgtttcatttttttaaatttacattcactggaggaagcttttttttttgttttttgaagttattaccatgatgtttatcacatagaaccatttggctttaattttggatttgtgcagagggaaagactggataagtttcttgagtataaacaaatatatacacacacacacacacacacagaaacatgtttctgtgtgtgtgtgtatatatacacacacatatatatatatatatatatcacaaattttggcttaggagtcatcttttctcttaggttgatttttaattctaactcccagaaaacaattaatttatctttgttttatttgtcattgaggcccagcaaacctgaagtaaaagggtgagaaggtagggtgggtgctggataatgagaaattacttaagggttataatgtaaattatttgaatgatggataccctaaaagccctgacttcgccactatgcagtctatgcatgtaactaaattacatttgtacacaacacttttgtaaaaataaattaaaaagaacaactagagtttgctatcttgcttattcatacatacaaatacatcataaatgtttcccatgacattattattgatacaggagttaaaaagaaattatttaggcagatagtgagtgagggcaagaaagtccttcgtaaagctttccttttaataaaaagcagcccacaaattatttcttttttaacaaagaacagcctgtaaaatcaagctccaaacatcgataagcaagctgaaagcttgcatgaataaatgtcggcagctgtgccaataggaaaagggactaactgcggacggcgcatgtttaaaatggtgacaccctcttcccatttccttgttaaccacatgtacagtaagaagcaggcaacagggtgctggcaaatgctccatttgcataatagaagattagggtggagcagccagattccttgtgtgctgtgtaaactttctttattttattttattttattattatacattaacgtttagggtacatgtgcacaatgtgcaggttagttacatatgtatacatgtgccatgctggtgtgctgcacccattaactcgttatttagcattaggtatatctcctaatgctatcccttccccctcccccaagccacaacagtccccagagtttgatgttccccttcttgtgtccatgtgttctcattgttcgatttccacctatgaatgagaacatgtggtgtttggttttttgtccttacgatagtttactgagaatgatgatttccaatttcatccgtgtccctacaaaggacatgaactcatcatttttgatggctgcatagtattccatggtgtatatgtgccacattttcttaatccagtctatcactgttggacatttgggctggttccaagtcgttgctattgtgaatagtgctgcaataaacatacgtgtgcatgtgtctttataggagcatgatttatagtcctttgggtatctacccagtaatgggatggctgggtcaaatggtatttctagttctagatccctgaggaatcgccacactgacttccacaatggttgaactagttgacagtcccaccaacagtgtaaaagtgttcctatttctccacatcctctccagcacctgttctttcctgactttttaatgatcgccattctaactggtgtgagatggtatctcactgtggttttgatttgcatttctttgatggccagtgatggtgagcattttttcatgtgtcttttggctgcataaatgtcttgttttgagaagtgtctgttcacatcctttgcccactttttgatggggttgttgttttctggtaaatttgtttgagttcattgtagattctgtatattagccctttgtcagatgagtaggttgcgaaaattttctcccattttgtaggttgcctgttgactctgatggtaatttctttagctgtgcagaagctctttagtttaattagatcccatttctcaattttggcttttattgccattgcttttggtgttttagacatgaagtccttgcccatgcctatgtcctgaatggtaatgcctaggttttcttctagggtttttatggttttaggtctaacgtttaaattgttaatccattttcaattaattttctataaggtgtaaggaagggatccagtttcagctttctacatatggctagccagttttcccagcaccatttattaaacagggaatcctttccccattgcttatttttctcaggtttgccaaagatcagatagttgtagctatgcggcattatttctgagggctctgttctgttccattgatctatatctctgttttggtaccagtaccatgctgttttggttactgtagccttgtagtatagtatgaagtcaggtagcatgatgcctccagctttgttcttttggcttaggattgagttggcgatgtggcctcttttttggttccatgtgaactttaaagtagttttttccaattctctgaagaaagtcattggtagcttgatggggttggcattgaatctataaattaccttgggcagtatggccattttcatgatattgattcttcgtatccatgagcatggaatgttcttcccttttttgtatcctcctttatttcattgagcagtggtttgtagttctccttgaagaggtccttcacgtcccttgtaagttggattcctaggtattttattctctttgaagcaattgtgaatgggagttcatgcatgatttggctctctgtctgttgttggtgtataagaatgcttgtgatttttgtacattgattttgtatcctgagacattgctgaagttgcttatcagcttaaggagattttgggctgagacaatggggttttctaggtatacaatcatgtcatctgcaaacagggacaatttgacttcctcttttcctaattgaataccctttatttccttctcctgcctaattgccctggccagaacttccaacactatgttgaataggggtgttgagagagtgcatccctgtcttgtgccagttttcaaagggaatgcttccagtttttgcccattcagtatgatattggctgtgggtttgtcatagatagctcttattattttgagatacgtcacatcaatacctaatttattgagagtttttagcatgaagttttgttgaattttgtcaaaggccttttctgcagctattgagataatcatgtggtttttgtctttggttctgtttatatgctggattacatttattgatttgtgtatattgagccagccttgcatcccagggatgaagcccacttgatcatggtggataagctttttgatgcgctgctggattcggtttgccagtattttattgaggatttttgcattgatgttcatcaagaatatttgtctaaaattctcttttttggttgtgtctctgcccggctttggtatcaggatgatgctggcctcataaaatgagttagggaggattccctctttttctattgattggaatagtttcagaaggaatggtaccagttcttccttgtacctctggtagaattcggctgtgaatccatgtggtcctggactctttttgttggtaagctgttgattattgccacaatttcggagcctgttattggtctatccagagattcaacttcttcctggtttagtcttgggagggtgtatgtgtcgaggaatttatccatttcttctagattttcttctacatttatccatttcttctagatttctagtttatttgcatagaggtgtttttagtattctctgatggtagtttgtatttctgtggaatcggtgttgatatcccctttatcattttttattgcatctgtttgattcttctctcttttctttattagtcttgctagcggtctatcaattttgttgatgctttcaaaaaaccagctcctggattctttaatttttctgaagggtttcttgtgtctctatttccttcagttctgctctgattttagttatttcttgccttctgctagcttttgaatgtgtttgctcttgcttttctagttctttcaattgtgatattaggccgtcaatttttgttatttcttgctttctcttgtgggcatttagtgatataaatttccctctacacactgctttgaatgtgtcccagagattctggtatgttgtgtctttgttctcgttggtttcaaagaacttctttatttctgccttcatttcgttatgtccccagtagtcattcaggagcaggttgttcggtttccatgtagttgagtggttttgagtgagtttcttgatcctgagttctagtttgattgcactgtggtctgagagacagtttgttataatttctgttcttttacatttgctgaggagagctttacttccaactatgtggccaattttgggataggtgtggtgtggtgctgaaaaaaatgtatattctgttgatttggggtggagagttccgtagatgtctattagatccacttggtgcagagctgagttcaattcctgggtatccttgttaactttctgtctcgttgatctgtctaatgttgacaatggggtgttaacgtctcccattattatagtgtgggagtcaaagtctctttgtaggtctctctggacttgttttatgagtctgggtgctcctgtattgggtgcatatatatttaggatagttagctcttcttgttgaattgatccctttaacattatgtaatggccttctttgtctcttttgttctttgttggtttaaagtctgttttatcagagactaggattgcaacccctgcctttttttgttttccatttgcttggtagatcttcctccatccttttattttgagcctatgtgtgtctctgcacatgagatgggtttcctgaatacagcacactgatgggtcttgactctttatccaatttgccagtctctgtcttttaattggagcatttagtccgtttacatttaaaattaatatttttatgtgtgaatttgatcctgtcattatgatgttagctggttattttgctcgttagttgatgcagtgtctttgtagcttcgacagtctttacaatttggtgtgattttgcagtggctgataccggtttttcctttccatgtttagtgcttccttcaggagctcttttagggcaggcctggtggtgacaaaatctctcagcatttgcttgtctgtaaagtgttttatttctccttcacttatgaagcttagtttgggtggatatgaaattctgggttgaaaattcttttctttaagaatgttgaatattggctcccactctcttctggcttgtagagtttctgctgacaggtccgctgttagtctgatgggcttccctttgtggctaatctgacctttctctctggctgtccttaacattttttccttcatttcaattttggtgaatctgacaattatgtgtcttggagttgctctttttgaggagtatctttgtggcgttctctgtatttcctgaatctgaatgttggcctgccttacttgattggggaagttctcctggataatatcctgcagagtgttttccaacttggttccattctccccgtcactttcaggtacaccaatcagacgtagatttggccttttcacatagtcccatatttcttggaggcttttttcatttctttttattcttttttctctaaacttcccttctcgcttcatttcattcatttcatcttccatcactgataccctttcttccagttgattgcattggttcctgaggcttctgcattcttcacgtagttctggagccttggctttcagctgcatcagctcctttaagcagttctctgtattggttattctagttgtacattcgtctaaatttttttcaaagtttttaacttctttgcctttggtttgaatttcctcctgtagctgagagtagtttgatcatctgaagccttcttctctcaactcctgaaagtcattctctgtccagctttgtttcattgctggtgaggaactgcgttcctttggaggaggagaggccctctgctttttagagtttccagtttttctgctctgttttttctgcatctttgtggttttatcttcttttggtctttgatgatggtgttgtacatatgggtttttggtgtgtatgtcctttctgcttgttagttttccttctaacaggcaggaccctcagctgcagatctgttggagttttctagaggttcactccagaccctttttgcctgggtatcagcagcgatggctgcagaacagctgatttttgtgaaccgcgaatgctactgtctgatcgttcttctggaaattttgtctcagaggagtacccggctgtgtgaggtgtcagtctgcccctactggggggtgcctcccagttaggctgcttggggttcaggggtcaggaacccacttgaggaggcagtctgcctgttctcagatctccagctgtgtgctgggagaaccactgctctcttcaaagctgtcagacagggatatttaagtctgcagaagttactgctgtctttttgtttgtctgtgccctgcccctagaggtggagtctacagaggcaggcaggcctccttgagctttggtgggctccacccagttggagcttcccatctgctttgtttacctaagcaagcctgggcaatggcaggcgcccctcccccagcctcgctgccaccttgcagtttgatctcagactgctgtgctagcaatcagcgaggctccatgggcgtaggaccctccgagccaggtgcaggatataatctgctggtgtgacatttttaagcctgttggaaaagcacagtattagagtgggagtgacccgactttccaggtgccatctgtcacccctttctttgacttggaaagggaagtccctgaccccttgtgcttcctgagtgaggcaatgcctcaccctgcttcagctcgcacatggtgtgctgaacccactgtcctgcgcccactgtctggcactctctagtgaggtgaactcagtacctcagatggaaatgcagaaatcacctgtcttctgcgtcactcatgctgggagctgtagtccagagctcttcctatttggccttctcagctgcccgcctcagctgtgtaaactttcaaacctgatccaaccaatgtttgggccctatgtaaaccagccacctgctcctgaagccagtgtgtaaaatccattgcgcttcactgcaggctggaagtcccactgagaggcactgctctttctcagaagagaagactattctcctttctctttcttttgcctattaaaccactgctcctaaaccatcttcttgtgtgtccatgcactgatttccttggcattagatgacgaacctcgggtctttaccccacacaggtgatgccacttcagtatgttaaaactcattaatttattagttaaaattgctttattaataaatatagcactttttttttttgagacggagtctcactctgtcacccaggctggagtgcagtgacgtgatctcagcttactgcaacctccacctccctggttcaagcgattctactgtctcggcctcctgagtagctgggagtacaggcgtgtgccgccacgtccggctaatgttttctatttttagtagagacagggtttcatcgtgttagccaggatggtcttgatctcctgaccttgtaatccacctgacttgacctcccaaagtgctgggattgcaggcgggagacaccacgcatggcaaaatatagcacattttaaagaccactgatgcacagtgcaaaaactgccatatatgaatatgacatcaaattatacttccagtaacagtgttaggaaaggtcttgttaccctacactaactatttatgaatagtttaatggaatatgctgttttaaaaaatattttccattttggtatgtgaaaaaatggcatctcattatttatttatttatttatttatttatttatttatttatttatttttgagatagagtctcgctctgttggccaggctggagtgcagtggcatgatcttggctcactgaaacctctgtctcccgggctcaagcaattctcctgtctcagcatccctagtagctgtgattataggtgtgtgccaccacgcctggccaatttttgtatttctagtagagacaggtttacatcattttggccagggtagtctcaaattcctgaccttggcctcccaaagtactgggattacaggtatgagccaccgcgcttggtgacatctcattattttaatatgaattttagtaactattaggtaacttgtttttatatatgtttagtgtactactttttgaattgcctagtcatggcttctgcttattttgctattaaattatttaactttttactgatttatataagcttttgctatccacattatagtaataagttgtctaaaattattttacatgtatcttcattcagctcccagagtccatcttcaatgcttttgatagaaaaggagttcctcccttctaaagatgtctactcttagtttaaatatgtaccaattagtaatacacaattagggaagtttaaacactgtctaattaaatttgatttggggaaaataaatgttctcacctttccatttttatttaaccatgtgtaagaaggcagcctatacattctggggtaaaaagtctctttttaaaaagagaaaatgtattctatcaaagagggtaccaaattccaagtttgcactgcactttgctgaacaccttgtattttttcaagcttaaactttctaaaaggttagcagtattctctgtgaaacacagagctgctcacattgcagccctgctccaaaacatttggtggttcataacagcctgcaaagctgagcccccatccatgtttctaaggccaacatctcttaacatcccaaatctatacgacactcccaaagtatattcttttgtcaaactccacttcttgtcctaccctgtccttaaataagcctcatatttttatacttcatgtcctgtacttaaactgcttttttgcctagatgtacatttttcttttcccacattcttcttctccacatggaaaacgtgcacatttgtgagtatcacctttactctctactgcaacttctcacttgccagttctccacttgttcttgctggttgtaaggcactgatgaattttagaactggaaccatattatatccatctttgcagttctagagcctggtatcaggtgtaggtgtcaagaaatggttcccaatggaagcttgctgatagtgatcttcaacagatgagacaagaaaggagccagaatgctgatttactaatccagattactttccactattgttttgctgaaactctccaatgtcatgagaaaaataacaatgataataataatactagtagcaaatacagaagataagtcagttaaaattgagctggtagcatgcataacttcaattctgtatttattactggtttcaaaatattccttatccacaaattggaagaaacaggaaacagaccctcaagtgtctttcacaatgcaagacctgccaatttcataacttgctcagccaccctcataaaagaaactaggcacactggtgaccccatctcacacacactcaaaggagacagaaggtcttcctctcactgtcctccagtacatgtggctcctccttcttaaaaagcaaaacaacaaagaaataatacctcccagagggtatgacacttgaacttggacaagtgtttttttttttgttgtttttttttaagatggaatctcgctctgttgcccaggctggagtgcagtggtgggatcttggctcactgcaaggttcgcccacgccaattctcctgccttagcctcccgagtagctgggactacaggcgcctgccataacgcctggctaattttttagtatttttagtagagaccaggtttcaccgtgttagccaggatggtctcgatctcctgacctcgtgatccacctgcctcagcctcccaaagtgctgggattacagacgtgagccactgtgcccggcctgatcttcaagtttttagattcgattagtaatcaagtcaattcaatttttgcccttacttggctcatatcacatattatggacctcttaggatcactctatgcaaattctgaggcaaaaccttgagtttccatattatgtaaaataacagtaacctgttatgaaacaacagtagagctgttcttaaggcattgaccctgcccaaagcacaacttaatttcccaaacagttatgagtttagtttcaaaatctcttcaaaaataggcttcatatgagtctttgaacagggctcagcactttcagtgaggttaaaagtgggtgtccacaaggaaggtttcaagagataagaaagccccccattaatcaccacacagaggactagcagaatcatagagtccatgcccaccctttttcacttctagaatatctcccaccatgtgaaaaaccacctctcttccacatgctatccttttcaatgagaacatggtaaacatttcatcctcagcaggatttgttcagggtttcactctactttcccactgggtctcagtctgccagctttctgctttagtgtctttttgaactccccctctttaagggcacagaaatcctcatcagtcagttcatctactaatatgacctctgcaagcccctcactctacaaaacaccattcctgaccatcacagaagggaaggtctaacttatgtggtcaaatattagctaaaatgtgttgttcaataggtaagctgtaatttaattctggaaaccagacccctgtcctggcacacttacactttttccttggtgtgccaatcttttcccttgatgtgcctaatagggaggactctgaacacaggaggttttcagttagtatttgtttggtgaatggatcatgtctctatggtaggtagtctggcatgggtcaggagcacagccctggagacaaacttaatagtttgagttctaatagctggctgcctctctgggtctttatatcctcatctgaatcctgaggataataattacatctacacctctctgtcgaagaattgtgatgaatgaaaaagatgatgcataaagaaaaattaggatgctggtagctagctctcagtaattgttagatctgatgacatttgctcctactgctatcaagctgagtgtgtttctatgtataaaagctaacaaccaacaagctgagtgtgtttctatgtataaaaactaacaaccaacaaagggtgaaaattaaagtaaaacttgattgttaacttgtcagactggagtcctatggattaacaggtctagcacaggtagaagagaaagaaatacttaacttctggtttatttgatttaatgcaaatacaggaaaacctggataagaaatgcttttcaccaaagtttgtctgcaacttgaatgctgtaggttaaactaatttaaaagtactctagacagattcatttgtaatataagcatgtcatagtttctggtgtttaggactggatttatgtttatttagttttctgaagagacacaagagacagcccaagctgctatcggaattcctagagacaagttgggcaaatgagcccttacaaaattccatttatggtaaagataataatgaaataaataattactgagaccagctccatcagcgagaccctaacccagcagtgctagaggaattaaagacacactcacagaaggtgtgaagtgggaaatcggggtctcacagccttcagagctgagagcctcgaacagagatttacccacatatttattaacagcaagccaatcattagcattgtttctatagatattagattaactaaaagtatcccttatgagaaatgaagggatgggtcaaaataaagagatgggttgggctacgtatctgcagcaggagcatgtccttaaggcacagattgctcatgctgttgtttgtgggttttttttttaagagacagaaaaattttattaatgagtatgcatacaaataaacctagacaaccatgaagagtccctcacagtttcatgtattcacaatattatttcatctctaaagccatcagtgaacgactagttctgctacttgttaaagttgtgcaaaaattctcaatttaaacatacagtcttaattataccagtgttctaatgtcccaagactgattgtaggtaatggaatctcaacaatatcttaaataataatttaaaaaactcaatatgatctacaagactaatatatttaaaggaaaataattcacattcactaaattcctcccctttcttccttcttccctattctccctttcacttgccaatttttttctacagtatatgatgatggccaaattacccaatatcaactgtttcaaaaaagaaatgttattttagaagataccatacagcaagagacttataggtgtaacaccactgaaattatttactaagccctggccgggcatggtggcttacacctgcaattccaatactttgggaggttgagcaggcagatcacttgaggtcaggagttcaagaccaccctgggcaacatggtggaaccctgtctctactaaaaatacaaaaattaagtggacatggtggctatcccagctactcaggaggctgaggcaggagaactgcttgagcccgggaggcggaggttgcagtgagccaagattgtgccactacattctagcctggatgacagaaccagactctgtctcaaaagaaaaaaaaattatttaccaagctgtgttttcatagtgttttttaattctctgaactgcttcagtatctgcagtgttttttttacatttcaaagacttcccacatgtaacatttcattggaattaccactttacatcatagttgatatggaaattattacatctaacagatgaagaaaatgtagacataaagaaccattcgctctaatgtcatccagtgtaactgctaagagttaggattagactcaagtcctattcctaatcctgtatactaccctaaactcctaagcccccatacattgtacttcacagaatgctactagtgactgtgctcatgcattcaaacaagttttggaaatgttgtgttaagcaaagctaaccagattcccagagtctttattatgcatcataaatccccaggaaagatccagagtatagagcaggtgccataaagttaaaagtcccacaagtttcaagcaggtaacaaaggtgagcatgcaagggaaagtaaggacttggggattagaggatgcatccccatctagtggaagcctggtcacatagcaatccagcccaatcttgctgggtctttccagagaagctataaatcttggctttaatttcaaatctccagttttgtgcgtattgcctcaaatttaagaaaaaaaggcactatagtttaaaacaaataaaatttttgaccagatcgggccagccacatttgggaaaactgaaataccatgtatcataatctcatttgcccacagaattttccttcaaaggacttatacatttcctagaatgataacggtgttaaaaaatgttgcctctggctgggcgcagtggctcatgcctgtaatcccaacacttttgggaggtcaaggcaggtggctttcctgaggtcaggagttggagaccagcctggccaacatggtgaaaccccatctccactaaaaataaaaaataagctgggtgtggtggtgggcatctgtaatcccagctactcaggaggctgaggcaggagaatcacttgaacccgggaggcggaggttgcagtgagccaagattgtgccattgcatttcagcctgacaagagcaaaactacatctcaaaaaaacagaaatgaaaacaaacgttttcctctgaaagcaagcatcctgttaccccagacaactatggtatgggtagctctgaacctcaaccatgaattatttcagagttttttcaaactgaaattgaaattaatgcccagccttaactgttcatgtagaaatatttcttttctgacaaatctagctcttgcaaatctatgcttagtagagacggggtttctccatgttggtcaggctgttctcaaactcctgacctctagtgatccacccgcctcagccttccaaagtgctgggattagagcataagccaccatgcctggctggcaaatatatacttctaaacaattatgctgctttagtataattgttttttatatatttttgtactgattaaagatatccttacaataagtctaattgaattataaaaaaaaaattacaggaattgactagatatgagaaggacactttgcctttccaaaacaattttatctttctttttttttcttaaaattttttcttaatagagatggggtcttgccaagttgcccaggctggtctgaaatttctgggctcaagctatctgcacaccttgtcttcccaaagtgctgggattacaggcatgagtcatggcactagcctccaaatcaattttaaacataaaagtggtttggagacgatttagaatttgggtcaaaactagtgagtttcaaacacttatatctgcaatgtaacttataagtcagaaaaggcagccttttccctaccgcagcctttttttttctctcttttatttctgaccttcttggttctaaaaatttgttcagaaatcctgatggttgtttaaatgcttagcaccatgacacacatgtaatacaaattgcataaatggacggggcgtggtggctcatgcctgtgatcccagtaccctggaaggccaaggcaactggatcacctgaggtcaggagttcgagatcattctgtccaacatggtgaaaccctgtatctaccaaaaaaatacaaaaaattagctgagcatagtggcagacacctgtaatcccagctcgtgaggctgaggcaggagaatcgcttgaacccgggaggtggaggttacagtgagatgagatttcaccattgcaatccagcctgggcaacaagagcaaagctccatctcaaaaaaaaaaataatgtataaatatgttgaatcacctggcaaatgattttcttcccctggtgtctatgtgttccatactattgtagcctcttttaactggtaaaataactaccccaattcagagatccagtacttaatgcatcacatttccagagtcgtgagaaaacagctaaacctgttagagtgaattatactcactttgtttccccatagaggaaataaaacccacgattagaaacctttggaaaacataggaaatgcaacatttggaagtatatagaaacaagagataatcatgcaatgcttccaaatgaagtctcacattggatttgctgattttggagacagattcccctcttctggacagctttgatggccaagatagaagttcatttgctatgtttccagggactattctctttgatggatacaggatttatggggtctaaagagaacatacaattctaaagtgttcatgtttgagagaaaactctgcaatgatcagaaggattgagccagttttagcaaaacaaattaggactacattaatgatgaggttgactatacacagtttggagtgggagagttactctacccagtatcactgacatgttggaatgccagatgaaactgaaacagaaaaattgtcttggagtctaaaagacatctgatgtgctgatacctgttcagtcttctgcagtcatgggcgtaaactctcaaagagcaccactgggtcttagtccgtggcataaacattattctcaatgtagatattgtcttctgcttggacttcctttttaactgcattttgcaaagctttagtttgaagactgctaaatgaaacacttagttgttgagtctcctctttgaagaaatactttttggcaatgatgacacccaaaagagcaagaagcaccaagacagaaatacagactccagcacagattcctttagtggtgttgaccatctgtggactatatgctggggacagttgagtttgattgttattccaaaggccatctgaagactctgtcatggtgtcattcccatctgttgtgaaagagtgcaatggtgagctggtgggttgtgtccttatttctccctgaagtgtcatagggtgggtttctgctggctgaggtgaagatggtgaagtggctactgattgatggttctgcgtgggcaatggcgttggaggaacaaaggtagagaccattgttgtcattggaacacttgttttcattgaaatgctcgttgttgttggaacagtctttgtcgttggaacagttgttgtcgttggaacgcttgttgtcattggaacagtgatgctcgttcaaacagtagtggcggttggaacagttgtgacaattggtgtagtcgtgaccctgggtggcacaatctccaatgatagagtgattttcatgtcattgaaccacccactgtgctcaacatggcaacaatataagccactgtcagacacagctgtattttctatagtcaaagggacatcccttcttgaaaggtcccccaataccttatagtgtgtgtccttccgataggtgacgtgggttccattggtccagacaatgctatttcagcatgtgaataaagaacgtgcgcctctattccagcacatggatgtgacagctccattgtagtggcagggtagcgtgatagacggacctgccattccaccaacctttacagaaccagctacagaatctgccagatgtaggatgaggcttaagatggccacttcaggatacattatgggatcagccagttagttagaaggcagttttccagcttcttctccctcctcctagtctctgtttgtggacggctttaaatggttttccaccctgggtgggccaggtgttccttgccctcattctggtaaatgcacaacctcccagcatgggcattatggccatcatgtacatgtcacagtgctgcaaagattttgtttatggccagttttggggccagtttatggccagattttgggaggcctgttcccaacaaataataatctctgaacataagaatttgactagtgttaatcactccacttctccagtacactgatacttctccctttttcttagcataacacaaaacagatacatgactacacaccatctgctctccagtgcggaacagaggaacaaaggcataagcaagcttcagaacacagtcagccatgttcaccacatctatatctagcactgcttaaaacaaagtcaatgagaaactgagaagatgagtgactaccctattttcagcacttattgtcacaagaaaagaaaacatgcccacacactgtctccttctaaggcacagcatccactttcctgaggaaaaagtaactttacagcatatatctcaatctcacattattagcaagatgacactggctttgagcacacaaagaacaggcatattatagacactcttaagacacatcacatggcctggcttacctgatacaatttttaatttctctgaagtaaactcaaatttcaaacatgtatttctttattaacttatttcattaatttccacagggacttcacagaaagtatattcaactttcattcacttaatcttaccacaatagatggtgtaacatatccagaagacagccatatgtaagacatgctcataccccaaagcatagaaaacttaacacaacagggccttgaggaagcaacactataacagtgcaaatatacaaatatttaagaaaacctacatcacccaacaaagagcatgtatggtcaccactacccagcactctccaaaataagtagctatgaatagcttattcaaatttggcttatatatacttgtcaccacaaattggttctgaacatactgttccaattttggatattcacaacaagggtaattatctggtaagatatatttataataacttgtaattagattcctaaatgcacacatatacttgtgtcacagtgaggtgaaaaaaactctgagttatttgtagagtaccttaagatttaaatttccaaaaaacattcttaagcttagttttacaagtattccacccagcatctcttcagcaagctatttcaattttaaaaagtgaggactagggagggcttttaaaagttttatttctttctgttcagtttatcttatcccatacagaaatggaataaagtgtgatgtctgtcctaatgatatttatggttgtggtaatacagaaatatctatgcttccaagcaagaaatgaaaaattatggtttccccaaaatagagaaaccagtgctacctggggcccaaagagatgttcaggttacatctgtcagaattgataccatgcaagacaaccatctttggagaacagtggggctcacctgagattttggtgagtcatgtggatgacatcagagacaagcattacacaaaatgagcatcccaataagactttcatgtgagattgtcttagaagatggtggcccaactcacacagaagaggacggctgtgcatccaagagagactgatattttttctcaggagcagaaatcttaatgtaggagatggccactcactgagtagttgaggaatgccctgatggaactctctgggggtcagatttcacactgtctccctgagttgcataaagcacagaacagcatgcctgcactccagcttctagcatgtaccaactcagcagaaaacacatcactgtctattttgtttcaaaaatgctttgccatttaaaaaaagttaattaatatagtagaaacccaagaactacctaggggtagggagcatgtctgtcatcagaagtttttaaatgctggctagacaaacactctgtggaaataaatttcactctttgtgagaggggtaaaataaatctttttcttgggcactgacagatctagccaagatcctagtatacagcagataaacagcaacttctgtttactaaactttattttcacagattactggtgaagcaaaatattgatataactctaagacatgaagggtatcacaagaccactcatgttctttatgtggtttcaattaagaaatgaggtgaaaaatctggccatgaaatgagttttgatgctcctaagtagcatcagaactgctctgatgtgcttaagccattgtgacagtcctagctttgttcctacccaaagtctcttctcatgaatcctaggcttactggtcaaacagataaagcatccgtaaatcaaacacaaacttcaacgctcttaacatgtaggtgtacatctcatctgaaaatcattcaaaagctcaagccatctacaagaaatctttcctttgcattttagtatcaataaaaggaaagaaggaaaagaataggagaaagccatttaataattttcataggtaaaaatgtaacattggtttctcagttacataagtacttttcttgcttcatccatgacatacataatttttaaccaactaaaacacattacaagtagagaaatagctaaaatcatggaaagcatacacataactcttcaaagagtaggaaacattccctgttcatatgcattgcttaatccagcattccaatctcactgaggcaccagcatccacgctgttctctgaagcattctttttcctcctgtcacccatccttcagatattagctcaaatatcacttccatgggtcaccttccttaacctgcatcccggcatcctccattcctctcccatacaaaaaggccaaactttatgttggggtgatcagacccaacaccacatcgttggggtgacaaagtccgggggagtcaaaggattgagaaaaagacagagagaaaaaagtgggacaccagggggccatcattatcatggaggctgcaaaggcactgagctctgggagcccatggtattttttggtaatccagcaaagaaacaggtggtgagaatgtgggggtcaaaagagcaggcacatgatctacagctgtgacggtttagcatttatatggaacatgttctgctacttgagataatgggaataggggcctaggaaggctagaaacaaggagccagcaagtctagacacattccagaggacattatgcaagccctgtctcagtttccctcccaacacagctttttcccaacatgcccccttatcttttttgtaaaagagaaggtatcattattactagctatcattattactagcataaaaagtgccctcttttaattgagcaaggcgattgcaggctttgcagcccttaattgatggtgggtgatccagctttatttttcttagcctttattcaaactggagtcgctctggtttgaatgcttgccatatagctcccctttcccttttacataaggaccttaaccctaggggttgcagaaggatgaaggtccatcttctgtaacttcatgctgaatagaggtgatgatattcctgcctaactattagcatttcttgtattcacgacagagaggagctgagtcagaaagcattggtccattaagcgtcatgactctggtcggtcctcgttccatcttctcattcagattcgattgtctcatggctcatactggggaaacccgttccatggttggtatccatgtgtccctccagtctcccattccatggtcgtacacatcttgagggtgtccacatggtttgttcatctcctgcaaaaacaaaagcataccctcacccccacgttagtaaatctactgaaacagaagcaaaaattttgtggctgtagccaggaggccactgataatgagaaacaggctttttctgattaacagaaggtatagagaaagcaaatcgagacttttcaaaccttcaattctcactgtacaggtgggtccactagatgctgtggcttatgatagatcttcagatatttggtgggcacccacataggcacctgattgtcacctggagagacacaagcaaatccccttccccataaaattatctttaggcagggatcggaggaagtagactcagaggtaaggagaattttggggcctaatggcttcctgatgtttgataggtgttcctttggaagttaggaattccctttccatattgctgtgtgggcatggaggtctagctaagcataaagtttgtacatatatttaccctttttcattctcctaattctagtgtataatggctcctgcttttgctaggatgtctctccctaacaaaggtgtggggctttcaggcataattaaaaaggcttgtgaaaagagtcaagttccccagtcacaacttagtggctgggagaagtatctagtgactgcctgttctaggaccccttggatagtgacacatctggaggacagttgtccaggacaggagaataagactgagaagtccacacaagtgtccaagagacagttagcctcctggacctcaatggccaagcatacctggggagggtgatggcgtgggctggtgcttgccctgggcaccctcattcctgctgctggataatttggttagggcttctgacgcagaggacctttgtcccctggggcagtgggccttccagtgattcccttgacataaggggcatggacaaggaggtggcttatttctattcggacaatctttttaaaagggtccttgcagaccacactggaagcaagccctattaagcatttgattttcccagcctttcccttttccagagcctccaaagtctgcttgcctgagggtcatgactaaagctatggccttttctcgttgttgttagtttgtcccattctgcctgctcctcctgatctatagtataaaaaaaaacaaaaacaaaaacactgaggttgccaagttcaatagggtttctaagttttgttccgggcctaaggcggacttttgaagttttttctaaagcctgcagctgactgagtgataaacttgtcctttaagattagttggccttcaatagagtcaggtgacagagaggtatgctttctcaatgccaccctttgtctctccagaaaggcagtggggttttattcctttccctgtgttatagtggacatcattgaatactttataggcttcttcctagttttcctcagtccttctagcatgcaagttagcaaatgtctgtggcaccaatctccatgttctgatcctgcatcccaatgaaggtctacactgggaacttcctactggcctgtggggaattgttctctttcctctgttgtcatcctatcattgacctgactgagataccagagatcaccaaactctcgggctgcagttatggtggattagtgtctgatctagctgtaacatttatatctcactatgtcagatcaaaggattgtcctaacccttgtaaaacatcatggttatctgagaatttacctaggtctattttaatttgtttcaagtctgacaggaaaaaagttacataaactctgactgggctgaattctccagaatatatcttaggggtgtttttgccttggggagaacatttcccatctgaaaaaaagaacatagagatgacagaacccctagtcactttccactgagcattagtcctagagcatcctctatgtcctaatgcttattcctttccagggtgcataatacccatggacttctgcttattggattagttatgttcaccgatgtagcagtcctgcatctgttttctcacctttcttgaccacagagaaaggggtctgggctgctggattccagtggtcctttaccagcatgcccaacattgcctttgcactcaagaggtgagttctagagctgggctgggttcctatttgataacaacccagctgccccatcaagatgcactcccataaacagttcttatgtaaattaatttcagagagggtgtaggtaaacttttgagtcaggattgagataagagttgttttattctgaaagtactttaaggattggctgagtgcaaagagctcgcacgcttgagaggactaattattagataattttcctaactgcttctacaagagtttccctattgttcccccgacccccacctcaatcacccaggaggaaccatctgtcatcctgtcctggagggagttcctcctaggtctggtcagacctttgtatggtaattaagatttaaatacctcattaggaaatctgctgggttaagggaattttcagtggttaatgttaaatcaactttttctaacagaatagccccatactttaagattgagttagtaagctacctttttgctccttttactttggatagctctgaactggtgagatgtgctcacaatgaagtttcttctaaaagttatttttctcttttcttctgttagcaaagcagtggctgctaccgatggaatacatttgggccatctacaggttactggggttaaggattttgataagaaggctactggttgtcagtggtcttagtgcttttaggcaatgcccttgtttacactgacaacaatatagtattggagtgttatagggtcacggagaagaccattagttatcaattataggttttaaatttatcctggcttttaaaggaataagttacactgttttttctttaactacttacatctctctttctcctttgtagatggattttggaaacacagcggaaggacatttgcggtcctccctgctggattaaagttacaggaaattgccatgcttcaaggtcttcatctactctagccttttgaatataattttatatagcaccaccaattgctccaggttttaatgttgcaactacaggagcagtaagtctcatagctaattcatcttctcacccattaaggggagagagaggaggtggccttcacttaattgatcaggtggagccaatgggctagtaaaacatacttttttcagtttccctttcttttaatttctgtttcctgttcctcacattcagaatctgaagttagtttttacactcgtcctcctcttctttatctgaatctgcttcatcatgtgtttgaaatacctcaagagctgcttttattagcacccacattgaacaaaccaagactggaatttttgctccatctttatacactttttaaaaatctctgctaattctctcccattcctccaaagccatagtcccttgttccgggaactatggacaaaactgctttattgcactaaaaagtgagtgataacaaattctgagtactaactttcactccccctcttcgtaataagtgctttaagaaatttaaataagcagaatgctttcacgttgtcccatttttttaccctggttcttccaagccctcaactttcccgccgacgttcttttaaacgtcctcgggttacctttggcgatgcgtcctctgctttcacatgctctagtgttccttcaccggggtctttgtcaccccacattgggcgaccaggaatgttggggtgatcagacccaacaccaggtcatgggagtgacaaagtccagcagagtcaaaggactgagaaaaagactttgagagcgaaaaaggtgggacaccagggggccatcgctaattgaggaggctgcgaaggccctgagctctgggaacccaccgattttattggtaatccaacaaagaaacaggtggtgagaacgtggaggtcaaaagggtgggcccattatctacagttgtgacggtttagcatttatatgtaacatgttctactacttgagataatgggaatggagcctaggaaggctagaagcaaggagccagcaagtctagtcacatttcagaggactttatgcaagtcctgcctcagtttgcctcccaacactcagctttttcccaacaactttacttcttacaacaacttatcatgggaatggtaaatttggtggtgaaaaactgtctcttttctaaaagaaggctaaatctgaatcagaattgtacttaggaaaattaagttgtgaaactttaagaagcttttgaacacaaaatggttcttagaaaacttattttcataatttaaatacacatcaaattcagagaaacacaagttaagcatcctttaagttactcttggtttaaaacttttaagtagaatattttaaccacatacatattcatttaactaaacaaggaggagggcaggacaaaggtcagaccagtggcactgtatggctaaaagatcacacctttcattatactagacagtttttgtctgaggcctggggtcccagaacataaaaatgatcactgtctcctttattgcttccctgtattatccccatccttctcagccagggcagctgactgacatccaccttctcaagaggacatgcaaggacagaagacgtggctcagaaacactgctctatgaaaagggcagatagttatgtaagaattttgtaaaaacatgagtttttaatgaatgcaaaaacatgaactgtcaagcaagtaagagctgttcaaacaatttttttttttttggaggggggagacggagttttgctctcttgttgcccaggctggagtgcagtggtgtgatcttggctcactgcaacctcttcctcctgggttcaagcaattctcctccctcagcctcctgagtagctgggattacaggcgcatgccaccacggccagctaattttttgtatttttagtaaagacgaggtttcatcatgttggccaggctggtcttgaactcctgacctcaggtgctctacctgtcttggtctcccaaagtgcagggattacaggcatgagtcaccatgcctgtctgtcaaacaattttttaaaaagatatactccacataacttaaaacatgagggagactggcagatgacagcatcagagcgagtttccttaataactgaggaggtgattgggaaaactgagccatctaccaaaatagctttacagaaccaatgcatctcatttgttgtagaagctgatgagttctagagctcttatttactatggagttttcaaatacattgaacaccacttaatgttttcctcaatcccaagcttcttgtaaaactttcacgttgccaaccatggcatcttagaggcaaataaaagcttacctactttatggaatttcagatttctaaaaatagcacatgcaatacaagtcatgcacccagtatgcttgtggatgttttaaaggccactactataccttccaagcaggcttccttgacttcagctctgctgacatctgtggctgttctgtgcattgtaatatgcggagcagcatttctaatgtctgtgcactaaaggccggtagcatccttccccaacacaagacattcaaaattccggaaaggaaatccacagtggatgcccacgaagcttcctaatctcaaaatataacacttgattacatatgtaggttttgagtttctggaacatgtattttatccttacaactatcccatgaggtagaaaatctactgaaaagatgcctatcatcgtagtcagcaatgacaatgccaccaaaggctaaagtttcattttaaattcctttataccttcaaattcaataaaattttgaaaaaaagatcttctttattaaaaataacaacacacacacagaggtaaataagcagtatacatttaaagctacattttttttagatcaagttgactctataaagcagtttttccatggagctaggggtagttatgcattgtggatcctgaggttaatttatttccagctctgggcatatcataaagcagctatcaaataggtcaacatacccacccaaccctaatagtgttactctgagtataaacatggaatctttgctgaatggtttcaaaaaagcagggtgaaaataacttagtccaagaagatacatcaaaataaataaggaacatttttaagtaattaaaccaccggaaatatcacacattttatgtaatcttatcccattgtctctgaggaaagggaaaaaagagaaagtacaaagccagctagagaaagacaaatacagcttttaaaagctctaattaaccccactaagaaatttttttggctacctggagtacgcaggcactgtataatgtagggcagttgtccccaacctttttggcactagggtctggttttgcagaagacaggtttttcacatatgtggtgggacggttttcttttggaataattcaagcacactacatttgttgtgcactttctttctattattacattgtaatgtataatgaaataattatgcaactcaccataatgtagaatcagtgagagccctgggattgttctcctgcaactagatgttcccatctggtggtgatgagagacagtaacaaatccttaggcattagattctcataaatagtgtgcaacctacatccctcacatgtgcagttcacaatagggtctgcactcctaggataatctaatgctgccactgatctgtaatatgaacaatggggagtggctgtgaatactgatgaagcttcgctcactcactgttcatctcctgttgtgcagcctggtttataacaggccacagactggtatctgtctgtgccctgggtgttgggggccccgatgtagggcaattacatttattcatttatttattgagtgcaatggcatgatcctggctcactgcaattttcaacttccaggttcaagcaattctcctgcctcagcctccccagtagctgtgattacaggcatgaaccactatgcccggttaattttgtatttttactagagatggagtttcaccatgttggccaggctggtctcaaactcctggcctcaggtaatccactcatctcagcctcccaaaatgctgggattacaggcacaagccaccatgcctggctggcaactacatttattaccatccatttattaccagggcacctatgttgtacagtgcctggcacacaacaggtagccaataaacagctattgatctaatgcaggaataataaagtaaggtttattttttctcctttaacatgctgtagttgtgtcagatgttaataagacctccggagtctgcctgaagtaacataaaacaaaagacccattcatcaaacaatcacctggaccccctaacttgttacaagttaggtatgaatgtaccacctgtaccagcttagtgagatgaatgtttaccatcacataacaaatacttgtttgccacgctaagggcttagagtttgaatttctgatgagaaataaagtggcatgtacaaaaccccagagaatgatattccatatatccataagcatcagtagcatatcttaaaagtctcacacatccagcaaatcctttaaaaacaagatatcctaatatgcagccagtttagcaattttttttttttttcagagtctctctctgtcacccaggctggagtacagtgatgctagatgggctcactgcaagctccgcctcctgggttcacgccattctcctgcctcagcctccctagtagctgggactacaggcgcccgccacaacgcccggctaattttttgcgtgtgtgttttttagtagagacggggtttcactgtgttagccaggatggtctcgatctcctgacctcatgatccgccagcctcggcctcccaaagtgctgggattacaggcgtgagccaccgtgcccggccagcaatatttttaagaatgataagacagtgcagcttcatttacctgaaatggagcacaagttctttttgaaggaattcatacccattcctgcaaaagttctgtggtctcttgaaggtagcacagaactaagcgtttttttgtgtgtgtgtttccaaagaggttttagccaagattttagtctctaacagactccctgattaaaatatggcttagaaactatacctgcctacttgaaaaagcatcaaatctacagaatacttttcacggatgtacaaaaatgaaaacaaaataacattctactttttgcaattcactttttctcaccttccacttctcttaaatatacttcagaatcattatgcacaggtgcagagaccactacatatctaaaaaaggagaaaaccctcaaatatttggggatggactggcaatattgccttgcagaaataattttgtttccttcagacagaaatgtctcactattttcagcattcttacctaacaggcaaattttgtttccattgactttgaaagggctaagcttaaatctaaactcttaaacaagaatgaagtttaaattttttattaatgaaaatcccagacaggtttttccaaatctttatatatttatatataaacgtaacaaatctttatatatttttttgaaaaggtggcttatttttttaattttattattattatactttaagtttcagggtacactgcacagtgtgcaggtttgttacatatgtatatatgtgccatgttggtgtgctgcactcattaactcgtcatttagcattaggtatatctcctaatgctatccctcccccttcccccctctccaccacagtccctggtgtgtgatgttccccttcctgtgtccaagtgttctcactgttcaattcccatctatgagtgagaatatgtggtgtttggttttttgtccttgcaatagtttgctgagaatgatggtttccagcttcatccatgtccctacaaaggacatgaactcataattttttatggctgcatagtattccatggtgtatatgtgccacattttcttaatccagtctatcattgttggacatttgggaagaacctgcattgccaagtcaatcctaagccaaaagaacaaagctggagtcatcacgctacctgacttcaaactatactacaaggctacagtaaccaaaacagcatggtactggtatcaaaacagagatatagaccaatggaacagaacagagacctcagaaataatgccacatatccacaaccatctgatctttgacaaacctgacaaaaacaagaaatggggaaaggattccctatttaataaatgatgctaggaaaacaagctagccatatgtagaaagctgaaacttgatcccttccttacaccttatacaaaaattaattcaaggtggattaaagacttaaacgttagacctaaaaccataaaagccctagaagaaaacctaggcaataccattcaggacataggcatgggcaaggacttcatgtctaaaacaccaaaagcaatggcaacaaaagccaaaattgagaaatgggatctaattaaattaaagagcttctgcacagctaaagaaactaccatcagagtgaacaggcaacctacagaatgggagaaaatttttgcaatctactcatctgataaagagctaatatccagaatctacaatgaactcaaacaaatttacaagtaaaaaagaacaaccccatcaaaaagtgggcaaaggatgtgaacagacacttctcaaaagaagacatttatgcagccaaaaaacacatgaaaaactgctcctcatcactggtcattagagaaatgcaaatcgaaaccataatgagataccatctcacactagttagaatggcgatcattaaaaagtcaggaaacaacaggtgctggagaggatgtggagaaataggaacacttttacactgttggtgggactgtaaactagttcaaccattgtggaagtcagtgtggcaattcctcaggggtctagaactagaaataccatttgacccagccattccattacgggatatatacccaaaggattataaatcatgctgctataaagacacatgcacatgtatgtttattgcagctctattcacaatagcaaagacttggaaccaaatctttatattttttattcacccttctctctctctccacaaccactaacataaccacccacaaaagaagaagacaatcccttcaatgttccccgaatgtgtgctgctgctagctcggaagctctgtagagttttgtaacggagtgtgaactgctggcctggatctcctaaccagtaaggagagagggaggacaaatccgctgagcaggtaaaaattctttcctcctcgttataatctttcatggattcagcactgaggagagtggccagggcatggggcccgtgcaaagtggcccaatggccagcacgttctgcaccgagcagggtccccacgccctgcatatctccgccctgcctggaaaggaagtggtcccgccaggcagtggaatcggccgctgtgccccatcctcactctgggccagggaatgggtcacatcctcgatgtgccctcggcccagaaaacgcgccgcttcgcaaggagggcgtcggcaactggaatgacatcccctactccttagtaaacattagggtcgcagtttcctaacagacatgagtgggatggggagaggggtcccaggcagaggctggtgctgggggcagaggaaaccacagtaggatgagggccggtgtgggaggaggaagggaagccccggaactgctacaaattttttcagcgggagaaggtcctccgcctttttccaggactcacgaggcacctggcaccgagcccccgactcgcacaaggaaggtgaactccacactgatggatccctgtaaaacacgcacctgtccaatggaagggcgaggaacgatcggcgcccccatggcaagtccctgacacccttctttcctgtgtgccttaggtggtagtcggccacaacacaaccgccagccaggaaaaggccagggtgcggggatgcccgctgccccctcgacgccagtgtcctctgcccaggaagatcaaatccgcagagcagggtgcgacaggggcttccaccaaataccttggcgagagcaccccaggaggccacctcacggctggcacccccaatgctttgcggctgcaggggaaagcaggagccctagtttccaggattccctgccagaaagggcctggaaggaccacagaaggaaagttcctcattccacaggggaaggatgccgggagacagagggcagaaagtggtgggcagcgttgggaagatgtttctggcattcaaggcttgcaccttctgagtcctggtggtgctgtagcaaatgaattcaccccgctattccgggaggccaaggcaggtggagcattcgagcccagaaatttcaaatcagcctgggcaacgtggtcagacgccgtcactacaaaaaacatttagtcaggtgtgatgggccacgcctgtattcccagctactcgggaggctgaggtgagaggatctcttgagactacagtgagtcataatcttgtgccactgcacttcagcctaggtgacggagcaagaccctttatcaaaaaataaataaataaacaactatataaataaactcagccacgggggttgggcccgattcctatcctccacaagctaatatagatacacattaggttttgctagtgcagcgctgcagaagctgccactatgtgtgctggatgctgattggcatgaccagtggctctgtaagaggaggagtagcagtggaggagtggagatagaggaagaggaaaaaagaaggggagaagaaaaggagaagaggaaaaggaggagagaaaatgggaggagaaaatgagaagaacaagaggagaggaggagaaaatgagaaaaagatagtaagaatagaggaagtggagaaaaaaaaacatcagaaggggacaatgggaccaggagaagagacgaggaaaaggaagctgggacaacgagaggagaaggaaaagataatgaggaggaggaaaagaggaggactaagaggagaggtggagagaaaaaggagggaaggaggaagaggagtaggagaggaagaggagcaggaggatgggagaagtatgaagagaaaatgaataaggaagcgaaggaggagaggaagagatgagaaggacgagaggaggaggaagaggaaagaagaaagaggagaggaggaaagaagaaagaggagaggaggagcagagaagaggaggaggataaaaaggagaagggtaggagaagagaaggaggagaagagtgagaaaaggaggaagacaggacgaggaggagcagaggaggaagtaaagagggaagaaggagagaaggagaagaagagacaggaaaaggggaggaggaggggagggggagaagaagacgagaaggaggaggagaggaaaaggagaagcaggaaaagagatggaggagaagaggaaaggaaaagaaggagaagatgaggagaagagaagaggaggaagagcaggagatgagaaggagaagaaaaggaggagaggaagaggagaagaaaggtgagaggaaaaaagaggagtagaagaggagaaggtggaggaggagagaaggaggaagaggaggagaaggaggagaggaggagcagagaaggaggaggagagaaggaatggaggaagaataggagagaagtaggaggagggaaaagaagaaggaggggaggatgagaggagaaggaggaggaacaggagaagaggagacagagaggaggaaaagaaggaaaggaagaggagatgcaggaggaaaaagaaggaaaggaggaggagaaggtagacgaggagaggagaaagaggaagagaaaatgaggagaagtagaaggaggtgaggaggaggagagaaggagaaaaggggaggagaatggggggattaggagaggagaaaaaggagaaggagagtagaaaaaggagtaggaggagaacaggagaaggaggaggaggaaaaagagtaggagaggagaaggaggaggagtggaggaggaagaggaagaggagacaaggagaaggaggagagcaggaggaagagaggaaaaggagtggaggaggaagaggagatgaagagaggaagagaaggaggaggaaggaggaagaggagaggagaaggaagagtaggaggagaaaaggagaggaggaagaggagaaggaggaggagatgaggaggaagaaaaggaaagaaagaagaggaggagaggagaagaaggaggagttgaggaggagaggagtcagagaaggagtaggagaggaggcaaagtaaaagattggtagtaggaggaaaggtttagggggaaaaggagaggagcagaatcaggaggaaaagaggaggagatggggaggaacagagtaggagatgagaaaaaggaggaggagaagagaaggaggagaaagacaagagcaggagatgagaaggaggaacagagtaggagatgagaaaaaggaggaggggaagaggagaaggaggaggaggatgagagcaggagaggagaaggacaaggagaggagatgaaggagaaataaagtagaaggagggagaggagaaaaagagtaggaggagaagcagaggagcaggagataaaggataaaatgagaggaggaggagaaatagaggagaagcagaggagcaggagataaaggataaaatgagaggaggaggagaaatagaggagaaccagtggagaaggaggaggatgacaggaggaggaagaggcaatggagaagaggagaggaggagaagaggagaagggggaggaactgtggaggaggaggaggagaggagaaggaggatgggagaaggaggaggggagaaggaggagaagaagacaagtaggagaaggagagaaggaggaggaggaaaagaaaaggaagagggggaaaggagaaggaggaggagaggaggagtagaggaggaagaggagaggaggaggaggagagaaagatgagaggaagaaaaggagaggaggatgaagagagaaagaggagaaaatgaggagaggaggaagaggaggagacagaggagaaaaagggggaggggagaggagtaagagaggaggaggagaggacaaggatgagaggaggagcagaagaggaagaggaaaggaggagatggaaaggaggaagagaaaaggagaagaagatgaaaaaagccatcactttgtggtgtttagtaattatgactattttcatggcttttggattaaagtttaaattcaataggagagatgagcacacagatccagattatttcagagctcaatttcagagctaaaggaaaagatatgtggtaatacacctgtggacgttgccaatgcaaaacagttgcattattttggtttgggatcaagccatatgtctccatacacaatgtatgtagtgcctaggagagagaagagtgcttggcccagtgatacattgcaatctcttcttggtcagagcccaaacatcacctaagttctaggtccagcaatacatcacaatactttctgagatgaagaccaaagcaggagagccacatcacctaggtaagagccctagaggtatggcacaatgccttctgtgggtaaggctcaggaagaagaggaaagttacataacctaggagctacagccagctatatgtcacaatcaccccaaggggcagggacgatgcatgagaggagggtcacataaagtaggtgctgagcaaagcaatatgtaacaatcagaggagagtgtcatctcctacttgctggaccatgagatatgttacaacatcccctttgggcaaatcccaggtaagagaagagatttgcatcaattaattgatgggctaagagatacttcgcaatgtcccctgtagaaagagactaggagaaataaataagattccctgtgtgctgggcccagggataagtcactttttcatctgtgggcatggcccaggtaggagaggagagtcatatcatttagatgctgggcacagagatatgtaacaatctcttctataagcaaaaccgtggtaagaaaagaaagacacataaaatattttatggacccagagatatgtcacaatgctctctcttgacagagtcaaggcaagaatgtcacatcaccttggtcctgggccccgctataggtcacaatgccttctgaaggcagggtcaaggcaaataagtaacatcttggagctgggtccagtatatatgtaacagtctcccctgtgggcagaacctaggaagaagagaagtgtcacattagctaggtgttgagctcagggatatgtcaccatccctcctgtgagcagaaaccaggcaagagatgagagtacattacctgggtgaggagtgcagagagatgccacaatccccactttaggctgggcccaggcagaaaagtcacatcacctgggtgttaaaatgagcaatatttcacaatgccccttgtgggcagcaccaaggtaggagagaaaacttacgtcacctgagtgcaagtcccagcgatatgtcactatgccttttgtaagaagcaccaaggcttgagaatagagtcatctcatctaggtgctgggtccagcaatatatcatgattctatttgtgaagtgagcccaggcaggagagtcaaatcaggtatttgacaggggcatatgtcaaaatcacaccttcaaaaaaattcagggatgagattaccaatccctcacatgtcctgtttctaggtctgagagtcaacatgtcttgtatgtttggtgaagtacatgagtcaaaatctcaactgtgaactggatctgtgcagcagcttctcaatgttttttgggcattatgccccttagataagtcataaccagccatgtgtgctaaattttggtttgagggtcaccaaatccatgcataacaaatccatgtatgagagtcaacattgcaactcttgactgcctctagatataagatttaaatcctcaacagtgggccacattcatgtgagaggacaacaatctttactcttgactgtctgcttactagtgttacaatctcacctttgagctgggctctgttagtacctatctgtaccacccaaagaatttatgagatacatagtttggctctatgtcctcacccaaatctcatctacaattgtaatctccacgtgtcaggggaggaaggtaattatatcatggggcagtttcccccatgctgttttcatgatagtgagtgagttctcaggagatctgatggttttataagtgttggaagttcctccttcattcactttctctctcctgccaccttgtgaagaaggtctctgcttccccttctgccatgatagcaagtttcctgaggcctccccagccatgtggaactgtgagctaattaaacctcttttctacataaattacctggtcttgaggagttctttatagcagtgtgaaaatgaactaatacaatatgatatgcaagagagttgcaaactgcattaagacctttatgccgatatgaacacatgattgtacgtgtcactctaagctcaggtgtgagagttaacacctccccagttggctgggtctaaatagaaaaggactcatctgcctataagctgggtttagaaaggggtcactatcccatatgtggccagatgttcacatatgactgacacaattccatctatagactgtgtcttcatgtgagattcaggatctcaccagtgggttgcgtccatgggtgaggatgactatcttaaggattggcagggtgtgcataccagaaatacaatagttcctgtgtccttggacctgtgatgatactctctgtaccacttgagggctttatacaatatgcaagagagaggtaaacctctgtgacctttatacaaagaagacacccaggatcttacctttttccctaagcctagctattacagacattatctttcttattggctagttcaaggtatgagaatgatcatcacacctgtaagctgggccaagatatatgtcacaatccctcctatggattaggagtaagcaggagagtaacattacctggatttggggccagttgtatgtggcaatcttctctaagggctcagtaatatgtcacaatgatctatgtattcaagacccagtcaaaagggcctcatcaccttgttgtggggtccagtgatatgtcataatcttttctgttaggagggtccaggcagaaaagaagtcacatttcctaggtagtgtatgcagatatatgtcacaaggccccctatggggagggtctaggcaggagcctcttattttctaggtgttggaccctgcattattttgcaatacaccaaatatttggggcctgggagaaaggagtcacatcacataggtgctgggccaagttatatgttaaaaaatatggtataatacccctgtgggcagggatcatgcagaaaagttgcatctcatagttgttaagataggccacatgtcacaatacacaatttatgctgagctcaggcaggagaaaagaataacatttacctatgtgctgggctaagtgatacatcacaatacctccttggtcagagcccacaaaatagaagagagttacctcacctaggtgctgagtccatcaatatgtcacaatactcactgaggaaagggccaaagaataagaattcattatttttggcgaagggcccagagctatgtaccaatgctccttgtaggtagggcttaggaaaaaagaagagagtcacacaacctgtcacgtaacctagacagatgagaccagctctatgtcaaaattaaaacgggtgtaagagtccgggcatgagaggagaatcacatcacataaatgttgggtgaaagaatatgtcacaatctagatagtggtgccagagatatgttgcagtgacccctgtgggcaatgagcaggcagtagaatcacatcacctgtgtgtagggcctagtgataattcactctaacttctgtgggcataacacaggcaaacaaggagagtcacaacacctaggtgctggtatcagagacatgtcacaatctcttctaatggcaaagcccaagtaagtgagaagagtcacatcaagtagttcattaacttagagatatgtcacaatgctccctgtgggcagggtccagacaagagactcacatcatcttagtgctgagcccagcaaaatatcacaaagctttctgaagtaaggaccaaggcaacagtgtaacatcaccttactgttgggtccagagacatgtcacaacctctcctgcagacagaacctaaaacgaatagaagagtcacatcaactcaatgctgggcccaatgttgagtcacaatatttcccatgagcagagatcaggcagaagtgagtcatatcatgtgggtaatgggtgcagagatgtcacagtgcctcctgtaggcagggatcaggcaggagagttacatcacctgggttttggacacagtaatatatcacaatgggccatttgggcagtgtacaggcaggagaatcacataacctgggtgtggggcccagtgatatgtcacaatgccttctgtgcacagtgacaaaagagaagggtagactcacattaactgaatataaggcctagtgacagtgatatgtcaaaatgctgtctgtgggcagtgccaaggcagtggactagagtctcatcatgaaggtactgggtttagcaatatgtcaaaattccatctgtgtgatgggcacaggcagaagggtcaaagcacttagttgctggacagaggtgtacgtcacacaatctcacatgcagaacgatacagggataagattaaaattcttgcgcatgacccatttctaagtatgggagtcaacatctctatgttgggtctaagtacatgagtcacaatctcttttttttttcttttcttttttttttttttttgagatgggatgtctctctgttgcccaggctggagtgcagtggcatgatctcagctttcggcaacctccacctcccaggttcatgcgattctcctgtatcagcctcctgagtagctgggactacaggtgcacgccaccacaccaggttaatctttgtatttttagtagagagggggttttgccatattggtcatgctggtctcaaactcctgacctcaggtgatctacccgcctcagcctcccaaagtgttaggattacaggcatgagccaccacacctggccaagtcacaatcttaatggactaggtctttgcatgagaagctcactttcttctgtgcactatgcctccttagtagagtcgcagcctcacaggtgtgctgaatcttggtctgagagtcagcaacccacttgtggactggatctacttgtaagaacaactttttcaagtttcgattatctccaaatgtgacattcagaacctcaaaagttggccgtgttcatgtggcagtatgacaatctttattgtcaactggatgtgcatacaagtgttaaaatctcacctgggctgtgccttgtcaggaaactctttgtagcacctgaggtctttatgcatgagagtctcaatatgatcagaggcctccctgctggtgggagccatggttataatttttaccaaacctctttgagagtcaacttctctccaattgggtgggtccaaataaaagtttccttacctaccaatgaactaggtttagaaatgagttaccatcaactgtagcatatgacagaaacaattccagctgtggactatgtcaacctgtgagattcaggatctcacctgcaggctctgtccacgtggaagggtgaaaatcctgatggatagtaggctgagaaacacaaactcatttggatgctggggtctgtgatggcattttgttccacactagggctttatatagtgtgtgagaaagtggcaattttctataccttcatacaaagaagagacatgggatcttgcccatttctctaatcccagctaaaacagacagtaacttttctattggctggtgtgtggtatgagagtcgccattccaactgctggctggaccaagatatatgtcacagtcttacctgtaggtaggaagcaaacatgagggtcacatcacctgtgttctgggccaggaatatatcacaatattccctgacacaagggaccaggcagaagagtcacatcacctgggtattcagccaggaatatgttacaatcccctcctgaaagcagggtgcaggctgcagagtcacatcacctctttaatgggcccagctttgtgtcaaaattctttctgtgggcaaggcccaattacaagagactcatcatctgtttgcttaggccagcaatatgtcacagtctttcctgtaggcagtgtgcaggcacaagaagacagccacatcagagatatgtcaccaggtccactgtggacggccccaggcaggagccttccattttctaggtattgggcccagcgatatgtcatgatactcaaaacatgtggggaccaggcaaaaaaaaaaaaaaaaagagagagagagactcacctcaccttgatgctgggtcaagtgatgtgtcacagtcttctctggcaggtcccaggcaacaaaaatgtgtcacatctcctaggtactgaacaaagagtatcatctaatacccctgtcttcagggctcatgaagaagggtcacatcacctacttgttgggtgcagccatatattactatacacaatgaatgctgggcccatgcaggagaagagagtaacatcccctaggtgctgcgtccaggtatacatcgcaatggctccttgagcagagcccaagaagtagagaagagtcacattacttaggtgccaggtacaacaatttttcacaatacttccagaaaggcctaggcagaagtgtcacatcatcttggtgaggtgacaagaaatatggggcaatgaccctggtgggtagggctagaaaaaaagagatgcatcacataatgtagggtcagtgctcatttatctgtcacagtctcaccagtgggcagggctcaggcaagagtggagagtaatattatgtaggtactgcagcaagcagtatgtcacaatttctaccgtggacaggtccaagacagaaaacgagaatcaaatcacataggtcatgggcccagaaatatgtcacagtggcccttgtgagcaacaaccaggcaaaagaatgacattgcttgtgtgctgggcccagtgataattcattattccttctgtgggtctggcacagggaagaggagagttacaacacctagctgtttggcccagaaatatgtcactatctcttctatgtcactatctcttcaaagtccacataaaacagcagagtcacatcacataattgatgcagccacagatatgtcataatgccttctgttggcagggcccattcaagagagtcataacatctagatgttggacccagccatatgtcataacacagaatgtattccaggcttaggcaagaaatgatagtcacatcagttaggtcttggacccatggaaacattaaaattttttattgagcaaaggctaagtagcagaggagagtcacacctcctaggctttaggtccagcaatatcttgcaatgacccctaagaggatgacccaggtaaaagggtaacatcatctatgtgagaggtctagaaatatgtcccaatctctgtgtgggtaaagaacaaaatgaagagggaagttatataacctaataggtgggctgatctatgtgtcccaatcactctagtggcaagagctcaaacatggaaggagagtcacacacataggtgccgaatattttgcaatacagaatgtgtgcagagcccagaaaggagaggacagtcacatcacctaggtgttgtgcccagcaatacattgcaatctcttttagggcaaagcccaaacagtagaggtaatccttgttgctggacccaaaaatatggcataacacaccctgaaaaagggcccaggcagaagaatcacatcgcctcaggagggttccaagaatatgtcaaaaggcctactgtgggtaaggctcaggaagaagagaagagaaaagtaacctaggggctggggccagccatatgttacaacaacctcagtgagcagggcccaggcatgagaggagggtcacataatgtagatgatgtgccaagtgatatgtcataactcacactgtggacaggtctctagaaataaaggtgagtcacataatctggttgatggtcacagagatacatcacaatgtatttatctcttgtcctcatgggcaggaaccaggcagaagaatcacatctcctctgggctgtgtccagggataatttactctcccttctgtgaccagagcccaggaagaaaaggagagtcacattatctagttggtggggccagagatatgtcacaatgtcacctgttggcaaatatgaagtaagagaggagagtaacatcaaatagatgatgggtccagaaatatgtcacaattccccctgtaggcagaatctaggcaggagactcacatcacctgggttttagacctagaaatatgtcacaagatgcaatttgggcaatgccaagacagaagaataaaaaacatataccctaggtgctaggtgcagaagtatgtaacaattccatgtgaccttcctggacctaacacatagggtatatgtctttattgtgacatccttactcaggtgcttggaagaagtgtatgtcacaatcagagctgcaggtaggttcaaggataagactaaaaatcctacacatgtccctatttgggtatgagagcaaacacctcttctatgttgggtctgagtacaaaattcacaatatcaacagtggactgaatttgttcatgagaacttcaatcccttctgtggaccgtatcttattcatggagtaatagcctcataggtgagttgaatcttagtctgaaatacaccaacccacctgtgaattacatcgtagtatgagtcaattatccaacttataacttcctcctaatgtgagattcagaacctcagcagtaaactgaattcacaaatgcaagaatgaaaatctttactaagagctttgtgtgcataagagtgtcacaatctcacctgggctagagatatattacaatcccctcctgaaagcaggtcacggacagcaaagtcacctcaccttgatgctgagccagcagtaaattacaatgttctctgttagcaaggaacatgaaggagagacacatcacctgggcttttgggcccagtaatatctcacaatctcccctgagggaagaacatacaaagaagaagagtcacgtcagccaggtgttgcgttagtcataggtaacaataccccctgtgagcaggaaccaggcagggaagtgagtcccaaaaatgtcccctttaggcagtgccaaggcaggataatagagtcacataacctaggtgctggatccaacaataagtcacaatcctgtacgtgggctgggcccagactataggtcaaatcactcaggtgctggccagaggcatatatcacatttacacctgcaggaaggtcataaaatgatatttacaatccagcacatgtcctgtttctaagtatgtgagttaacacctcatgtatcttagatgtaagtacctgagttaatctcaacaataaactgtatctgtgcatgagaggcacaatccttcctgtgtgctgttttatctgagtgaagttacagcctcacaggtgagctgaatattggtcttagagtcaccaaccttgtggaccagattcacatataaaagtcaattttccaatgtttgacagctttgggttgtgaaatccagagccttaacaatgggctgtgttcatgtgggaagatgacaatcttttctgtcgacttggtgagtgtcacaatctcacctatgtatcgccctagggctttatacctgatgcatgagattctcaatcttctctgagacatttatgctggtatggatcatgattgtacctgtggccttaagtccaagcatgagaatcaacatctctccaattagccgagtccagaatgaagaatcttcaccttcctatgagctgagattaaaatgagtcatcatcccaactgtgcttacatgtttacatatgatagtcacaatctcaactgtggactgtgtctgcatgtaagattcaggacctcaataatgggctttgtttaagtgagaaaatgatgagaaatacaacctctcctatgtcttgagccctgtgttgacactctctgtaccacccaaggactttctatgaaatgtgagacagtggtatttctctatgactttcatagaaaaatgagacctaggatttgacacgttttcctaagacagacagtattctcatattggctgactcaagttatgagagtaattatgacacctgtaaactgaattaagatatatgtgacaaccccacaactgggtaaggagggagtgagcaggagaatcacaccatctgggtgctgtgtcagagatatttacaaccttctctgagggcagtgaccaggaaagagagtcacaccatgttgttgctgggctagggttatgtcataatttttcatgagagtaggcaacaggcaacagagtcacagcacctgtgtttttagttatgatatgttataatcccatcctgaaagcaggactaaggcatcagagtcccttcaccttgttgccgggcctaacgatatgtcataatgtctctgtggctaggctgagtcagcaaaggcacattacctagtgctggctccagtaatgtgtcacagtgcttttggcatggcccaggcagaagaggaaatttgaaatacctaggtgatgaagaaaaagacacatcttaataaccttgtgggtaggacctatgcaggagagtcatatcacctaggtgttggacccagccatattttacaatgcacaatatacgtgggggccaggcaggagaggagagtttcatcacatgctcactgggctcagtaatatatccccatcttccctgtgcacaaggtgccagcagaagaggagagtcacatttcctaagtgatagatgtagagatatgtcacaggtctcctatgggcaggacccaggcaggaaccttttattttctagatgtttagtgcaaaaatatgtcataaagccttaaatatccaggggccaggcaaaagaggagtgtcatgttacctagaatctgtgtccagtagtatgtcacaacccctcattttttgtaagacccaggcagaagaggagagacacatcacataggtaatagacataaaaaatatattaaaatgcctttgtgagcagggcttatgtgagatagtagttatcacctaggcgtgacaacatgcaatatgtcacaacacacaatgtatgcagggcccaggcaggagaggagagtcacatcaccaaggtgcagggcacatcaacacataaaaattccttattggacagagtccaagatgttgagaaagttgcatcacctaaatgcttggtccaacaatatatcacaataccctctgagtgaaggccccaggcaggagagtgagtcacatcacctagctaagagacccagagatatgtaacgatgctttttctgacaaaggtccaggcaaaagaaacacattatctggtttctggatcaaatgatatgtcacaattctttctgttgtcagggtgcaggcagagatgaggagtcacattttctaggtgatatgtcacaatgcctactgtggggagggtccaagcaagaaactcaaatcaccttggtaatagtccaagcaatttttaatagtgcctttagaaggcaggactaaggctaaaagtgacatcacctttgtgttgagtccagcaatgtgtcacaatgcttcctacaaacatcaccaaggcagaacaggagactcatatcacctgggggcaaggcctacctgtatgtcacaatgcccctgtggattttggtaatgaaaaagaggagagtcacatcacctagctgaactcattgtcttttttccagcttaaactttctaaaagcttagcagtgttctctccaaaacacagagctgctcacattacagcccagctccaaaacgtttgatggctcataacagcctacacagctgagccaacatccattttcctaaggcgaactcctgttatcatatcaacgctacaccaccccgctaaactatattctcttgtcacactctacttcttgtcctaccctgtgctcaaataagcctcatattttaatacttcaagtcctgtacttaaactgcttttttgcccaaatttacatttcttctttcccacgttcttcttctacacatggaaaacctgcacatttgagggtatcaccttttctttccactgcaacttctcacttgccagttctccacgtgttcttgctggttgtgaggcactggtgaattttagaaccagaaccatattacatctatctttgtagttctagagcctggtaccaggtgtaggtgtcaaaaaatggttcccaatgcaagcttgctgaaagtgatattgaagagatgagaaaagaaaggagccagaatgctggtctactaatccagattgctttccaatattgttttgttgaaactctcccaatgtcatgagaaaaataacaatgataataataatactagtagtaaatacagaagataagtcagttaaaattgagctggtagcatgcatgacttcaattctctgtttattcctagttttgaaatagtccttatccacagataggaaaaaactggaaacagaacctcaagtgcctatcacaaggcaagatttgccaatttcataacttgctcaggcaccctcataaaagaatctaggcatgctgatgaccccatctcaaacattcaaaaaagacagaaggtttttctctcactgtcctccagtacatgtagctcctcctgcttaaaaagcaaaacaacaaagaaataatacctcccagaggctatcacagttgatcttggacaaatctttagattaaattagtagtcaagtcaattcaattgttgcccttacttggctcctatcatatgttatgaacttcttaggatcaacccaatgcaaattctgaggcaaaaccttgagtttctatattatgtaagtgacaataacctattataacaaaccaatagacctgttttcacagtgttgggcctacccaaagcaaaactaaatttcccaaacacttatgagtttacagtttcaaatctcttcaaaagtaggtttcatatgagtctttgaacagggctcagcactttcagtgaggttaaaagtgggtgtccacacaaaaggtttcaagagataagaaagtctcccactacccaccacacagaagaccagcagaatcacagagtccatgcccattctttttcacctgtgggaatatttcccaccatgtgaaagaccaccactttttcacatactattctttccaatgagaacatggtaaaaatttgatacttggcaggttttgttcagggtttcactctactttttcactgggtctcagtctgccagcattctgctttagtgtcttgttgaaccccccctctttaagggcacacaaatccaaatcagtcagttcatgcactaacatgacctctgcaagcccctcagtccacagaacaggaatctccattcctgaccatcacaggagggaagttctaacttacattgtcaaatattagctaaaattagctgttgaataggtaagctgtgatttatttctggaaaccagaaccctgtcctggcacatttatactttttccttggtgtgcccatcttttcccttgatatgcctaacaggaagaactctgcacacaggaggttttcagttagtatttttttggtgaacgaatcatgtctctatggtaggtagtctgtcaggggtcagaagcacagccctgaagacaaacttaacagtttgcattgtaatagctggcccactatctgggtccctattttctcatgtaaatcctgaggataataattacttctacacccctctgtcatagaattataatgaatgaaaaaagtgatgcttaaaaaaaattaggatgctggcagctattgctcaataattgttagaccttatgacttctgctcttactgctatcatgctgagtgtgtttctatgtaaaaaactaacaacgaacaaagtgggaaaattaagttacagcttttgattattgacttaccagattggattcctatcgattaataggtctagcacaggtagaagagggacagagtaggtcataggtcacaattcccactgtgagcaggaaccaggcaggagaagtgagtctcaacaatgtcccttctgggcagcaccaaggcaggataataaagccatgtcacctaggtgctgggtccaacaataagtcacaatcctgtatgtgggctgggcccaggctagaaagttcaatcactcaggtgctggccagaggcatatatcacatttacacttgtaggaaggtcatataatgatgtttacaatccagtgcatgtcctgtttctgagtacgtgagttaatgccttatgtaagttgggtcttagtacatgagttcatctcaactataaactggatctgtgcataagaggcacaatccttcctgtgtgctgttttatctgagtcagttacaacctcacagatgtgctgaatattggtcttagagtcattaacctacctgtggatcagattcacatatgagactcaattttccaacgtttgactgcttttggtggtgaaatccagagccttaacaatgggctgtgttgctgtgggaagatgactattggaggaaccagcccccactattttaacgtaggtttttctattttccctaagcgtcagcctgtctgagaaataaagagaaagagtacaaagagataaattttacagcttggcctccaggggtaacatcacatataggtaggttcatgatgttccctgagatgcaaaaccagcaagtttttactagggattttaaaaggggagggggtgcatgaacagggattaggtcacaaagatcacatgcttcaaagggcaacaaagatcacaaggcaaaggcaaaattagaattactgatgagggtctatgtcccgctgtgtacatattgtcttgataaacatcttaacaggaaacagggtttgagagcagagagcctgtctgaccaaaatttaccagctggaatttctcaatcctactaagcctgagggtactgcaggagaccggggcatatttcagtccttatctcaaccgcataagacagacacccccagagtggccacttatagacctccccccaggaatgcaattcttttcctagggccttaatattcaatattccttgctaggagaagaatttactgatatttcttctactctcacgtccatttataggctctttgcaagaagaaaaatatggctctattctgcccaaccctgcaggcacttagaccttatggttatcttctcttgttccctgaaaatcactgttattctgttcttttttaaggtgctctgatttcatattgttcaaacacatatgttttacaatcaatttggacaatagtgatcctgaggtgacataaattcccagcttacaaagataacaggataaagagattaaagtaaagacagacataagaaattatgagagtattattagagaagtgataaatgtccatgaaatcttcacaatttatgttcagagattgcagtaaagacagacataagaaataataaaactatgaattttaggaactgataaaagtctatgaaatattcacaatttatgttcttctgccgtggctccagccagtccctctgtttggggtccctgacttcctgcaacagatgacaattttttctgttgactgagtgagtgtcaaaatctcacttatgtatcaccctagggctttataccttatgcatgagattctcaatctgctctgagacatttgtgctgatgtgaatcatgatcattcctgtgctctttagcccaagtatgaggttcaatgtctctccaattagctgagtccagaatgaagaatcttcaccttcctatgagttgaccttaaaatgagtcaccatcccaactgtgtttacatgtttacatatgatagccacaatctcaaatgtagactacatcaaccagtaagattcaggacctcaataatgggcttcattcaattgagaaaataacaagaaacacaacctcacctgtgccttgggctctgtgttgacactccctgtaacatccaatggctttctattaaatgtgagacagaggtaattctctatgaccttcatacaaaaatgaggcctaggattttttctttatactttaagttttagggtacatgtgcacaatgtgcaggttagttacatatgtatgcatgagccatgttggtgtgctgcacccagtaactcctcatttaacattaggtatatatccaaatgctatccctcccccctacccccaccccacaacaggccccggagtgtgatgttccccttgttgtgtccatgtgttctcattgttcaactcccaactatgagtgaaaaaatgcggtgtttggttttttgtccttgagatagtttgctgagaatgatggtttccagcttcacccatgtctctacaaaggacatgaactcatcattttttatggctgcctagtattccatggtgtatatgggccacattttcttaatctagtctatcattgttggatatttgagttggttccaagtctttgctattgtgactagtgctgcaataaatatgcgtgtgcatgtgtctttatagcagcatgatttataatcctttgggtttatatctagtaatgggatggctgggtcaaatggtatttctagttctagatcactgaggaatcgccaaactgacttccatgatggttcaactagtttacattcccaccaatggtgtaaaagtgttcctatttctccacatcctctccagtacttgttgtttcctgactttttaatgattgctattctaactggtgtgaaatggtatctcattgtggttttgattgcgtttctctgatggccagtgatgatgagcattttatcatgtgtcttttggctgcataaatatcttcttttgagaagtgtctgttcatatccttcatccaatttttgatggggttgtttgttttttcttgtaaactggtttgagttcattgtagattctggatgttagccctttgtcagttgagtagattgcaaaaattttctcccattctgtaggttgcctgttcactctgatggtagtttctttagctgtgcagaagctctttagtttaattagatcccatttgtcaattttggcttttgttgccattgcttttggtgttttagacatgaagtccttgcccatgcctatgtcctgaatggtattgcttaggttttcttctagggcttttatggttttaggtttaacgtttaagtctgtaatccatcttgaattaatttttgtataaggtataaggaagggatccagtttcagctttctacatatggctagccagttttcccagcaccatttattaaatagggaatcctttccccatttcttgtttttgtcaggtttgtcaaagatcagacagtcgtagatatgtggcgttatttctgagggctctgttctgttccatttgtctatatctctgttttggtaccagtaccatgctgtttggttactgtagccttgtagtatagtttgaagtcaggtagcgtgatgcctccagctttgttcttttggcttaggattgacttggcaatgcaggctcttttttggttccatatgaactttaaagtagttttttcgaattctgtgaagaaagtcagtggtagcttgatggggatggcattgaatctataaattaccttgggcagtatggccattttcacgatattgattcttcctacccatgagcacagaatgttcttccatttgtttgtatcctcttttatttcattgagcagtggtttgttgttctccttgaagaggtctttcatgtcccaagtaggttggattcctaggtattttattctttttgaagcaattgtgaatgggagttcactcatgatttggctctctgtttgtctgttattgatgtataagaatgcttgtgattcttgtacattgattttgtatcctgagacttcactgaagttgcctatcagcttaaggaggttttgggctgagacaattggattttctagatttacaatcatgtcatctgcaaacagggacaatttgacttcctcttttcctaattgaataccctttatttccttctcctgcctgattgccctggccagaacttccaacactatgttgaacaggagtggtgagagaaggcatccctgtcttgtgccagttttcaaagggaatgcttccagtttttgcccattcagtatgatattggctttgggtttgccatagatagctctcattattttgagatacgtcccatcaatacctaatttatggagagttttttgttgaattttgtcaaaggccttttctgcatctactgagataatcatatggtttttgtcattggttctgtttatatgctggattatgtttattgatttgcatatgttgaaccagccttgcattccagggatgaagcccaactgatcatgttggataagcttttccatgtgctgctggatttggtttgccagtattttatgaggatttttgcatcgatgttcatcagggatatttgtctaaaattctcttttttatgtatgtctctgccaggctttggtatcaggatgaagctggcctcataaaatgagttagggaggattccctctttttctattgattggaatagtttcaggaggaatgataccagctcctccttgtacctctggtagaattcggctgtgaatccatctggtcctggactttttttggttagtaagctattaattattgcctcattttcagagcctgttactggtcttttaagagattcaacttcttcctggtttagtcttgggagggtgtatgtgtcgaggaatttatccatttcttttagattttttagtttatttgcatagaggtgtttatagtattttctgatgtagttagtatttctgtgggattggtggtgatatcccctttatcattttttattgcgtctatttgattcttccctcttttcttgtttattagtcttgctagtggtctatcaattttgttgatcttttcaaaaaaccagctccaggattcattgattttttgaagggatttttgtgtctttaggtccttcagttctgctctgatcttagttatttcttgccttctgctagcttttgaatgtgtttgctcttgcttctctagttgttttaattgtgatgttagggtgtgaattttagatctttcctgctttctcttgtgggcatttagtgctataaattttcctctgcacactgccttgaaaaaactactttaaagttgatatggaacaataaaagagcccgtgttgccaagtcaatcctaagccaaaagaacaaagctggagggatcacgctacctgacttcaaactatattacatgtctacagtaaccaaaacagcatggtactggtaccaaaacagagatatagaccaatggaacagaacagagccctcagaaataatgccgcatatctacaagtgtctgatttttgaccaacctgacaaaaacaagaaatggggaaaggattccctatttaataaatggtgctgggaaaacaggctagccatatgtagaaagctgaaattggatcgcttcctaacaccttatacaaaaattaattcaagatggattaaagacttaaatgttagacctaaaaccataaaaaccctagaagaaaacctagacaataccattcagtacataggcatgggcaaggacttcaggtctaaaacaccaaaagcaatggcaacaaaagccaaaattgacaaatgggatctaattaaactaaagagcttctgcacagctaaagaaactaccatcagagtgaacaggcaacctacagaatgggggaaaatttttgctatctactcaactgacaaagggctaacatccagaatctacaatgaactcaaaccagtttacaagaaaaaataaacaactccatcaaaaattgggtgaaggacatgaacagacacttctcaaaagaagatatttatgcagccaaaagacacatgataaaatgctcatcatcactggccatcagagaaatgcaaatcaaaccacaatgagataccatctcacatcagttagaatagtgaccattaaaaagccaggaaacaacaggtgctggagaggatgtggagaaataggaacacttttacactgttggtgggactgtaaactagttcaaccatcatggaagtcagtttggcgattcctcagtgatctagaactagaaataccatttgacccagccatcccattactgggtatatacccaaaggattataaatcttgctgctatgaagacacatgcacacgcatgtttattgcagcactagtcacaatagcaaagacttggaaccaacccaaatatccaacaatgatagactagattaagaaaatgtggcccatatacaccatggaatactatgcagccataaaaaatgatgagttcatgtcctttgtagagacatgggtgaagctggaaatcatcattctcagcaaactatcacaaggacaaaaaaccaaacaccacattttttcactcatagttgggagttgaacaatgagaacacatggacacaggaagcagaacgtcacaccctggggactgttttgggtcaggggagggtggagggatagaattaggagatatacctaatgctaaatgatgagtgaatgggtgcagcacaccaaaatggcacatgtatacttatgccacaaacctgcacattgtgcacacgttccctaaaacttaaagtattataataataaaaataaaaaaaagaaaagaaaggtttaactctgtaagatgaattcacacatcactaggaagtttcacaaagagcttctttctagtttttatctggggatattcagtttttcattgtaggcttccattgccccaaatgtttcttcactgcttctaccaaaagagaacttccaaactgctacatgtttaactctgtgagatgaatccattgaaccaaagcactttcacagatagcttctttctagttttcatctgggaatattttgtttcttgccatatgacttaatgggcttccaaatatgtaggtggaccccctgaaactgttgctatggaataaaagaagaaatgctcctgattattgtaaatacaaaattgcatgcaggattgtgtaaagacaatgccatgttgggctgccaaaacgagccaacagcctgtgatgttcttccacctgcagggagcctataaacagatatgcagtcagggagacttcaaaaaatcagtattcctgtcccagagaagcagatgttcataacttttggaatgcacatatcacaaattggtgtctcagaatgcttctttttagtttttttctgaagatatgtcctttttcaccataggccacaatgcattctgaaatatcccttcacagattctataaaaagagtgttgtaaaactgctcagtcaaaagaaaggtttaactctttgagatgaatgcacatatcacaaagcagtttccccaagagcttcttactagttttcattagaagatattttctttttcaccgtaggcctcaaaatgctcccaaatataccttcacagattttagaaaaccacaatttccaagctcctcaatcaaaagaaatgaataactctgtgaaataaaaggaaacatcacaaagctctttcttaggaacctttctagtttttatgtggagatatttcctttttcaccgtagtcctcattgagatctcaaatatccctttgcaaattaaacaaaaatagtattttgaaactgctcaatcaaaagaaaggtgtaactctgtgagaagaatgtactcatcacaaagcagttcctcagaaagcatctttctggtttttatctgaggatatttcctttttcaccatcagcctcattacattccctagtatcctttcacagattctaccaaaacagtttccaaactgctaaatcaaaagaaagcgttatttctgtgagatgaatgcacacatcacaaagtagtttctcagaaaatgtctttctagtttttatgtgaatatattttctttttcactgtaggtctcaatgcgctcccaaatatcccatcccagattctgaaaaaacagtgtttccaaacagctcaatcaaaagaaagctttaactctgtgagatgaatgcacaaaccacaaagctgtttctcagatatctttctaggtctatctgaagacatttaattattcaccataggcctgaatatattcttaaatatctctccacagattctacaaaaacactgtttccaaacttctgaatcaaaagaaagttttaactgtgtgagatgaatgtgcacatcacaaagcaccttctcagaaacttctttttagttttttgtgaagatatttcctttttcaccataggcctcgatgtgctcccaaatatccctttgcagattcaacaaaaacagtgtttccaagatgctcaatcaaaaaaataatttatctttgtgggatgaatgcacacatcacaaagcagtttctccaaaagcttctttctggttttcattcgaagatatttcatttttcaccataggcctcaatgcactccaaaacatccctttagggattatataaaatcggtgtttccaaactggtcaatcaaaagaaactttaactctgtgagatgaatgcacacaactcaaagaagcttctgagaaagcttctttctcgtttttatttgaagatatttcatttttcaccacaggcctcaatgtgttcccatataacccttgacagattctataaaaacagtgtttccaaacttctcaatcaaaagaaaggtttaactctgtgagatgaatgcatgcatcatgaagcagtttctcagaaagcttctttctagtttttatgttaatatacctcctttttcaccataggcctccatgtgctcccaaatatccctttgcagatacaacaaaaattgtgtttccaaactgctcaatcaaaagaaagctttaagtctgtgagatgaatgcacttatcacaaagctgttaatcagaaagcttctttctagtttttttgtgaagatatcctttttcaccataggcctcaattcgctctgaagaatcccttagcagatttgcaaaaacagtttttccgaactgctcaactgaaagaaagactcaactctgtgagatgaatacacacatggcaaatcagtttctcagaaagcttctttctactttttatctgaagatatttctttttcaccatagtccccatagcactcttaaatatctttttgcagattccacaaaaaatgtttttctctaaaatgttcaaccaaaagaaagcttaaactctatgagacaaatgcagacatcacaaaacagtttctcataaagcttctttctagtttttatctgaaggcatttcctctttcaccataggcctcaaaactgtcctaaatattccttcccattttctacaaaaacagtgtttccaaactgctcaagcaaaagaaagctttagctctgtgagaggaatgcacacatcacaaagaagtttctcagaaagcttctttctagtttttaccagaggatatttcctttttcaccataggcctcaatttgctcccagatatctattcacagattctacaaaaacggtatttcccagctgctcaatctaaagaaaggattaactccgtgatatgaatgcacgtataagaagcagtttctcagaaagcttctttctagtttttatctgaagattgttcttttacaacataggcctcattgagctccaaactgtaccctgacagactctacagaaacagtgtttccaaactgctaaatcaaaagaaagttttaactctgtgagaaaaatgaatacatcaaaaagcagattctcagaaagctgccttcaagtttttatctgaggatatttcctttttaaccataggcttcaattcactcccaaatatcccttagcagattctgcaaaaaaagtgtttccaaactcctcaatcaaaagaaagatttacctctatgagaggaatgcacacatcacaaagcagtgtctccaaatgcttctttctggtttttatctgaagatatttcctttttcgccatagcccaaagtgcttctaaatatcctttcgcaggttgtacaaaaacagtgtttccaaactgctccatcaaaagaaagcttaaactctgagacgaatgcagacatcacaaaccaggttctcagaaagcttctttctagtttttatgtgaagttatttcctttttcactctaggcatcaatgctctcccatatatcccttgacagagtctacaaaaaaagtgtttccaagctgctcaatcaaaagaaatttttaactctgtgagaggaatgaacacatcataaagcagtttctcagaaagttgctttcaagtttttatcagaggatatttcctttttcaccacagcaccaatatgctcccaaatatcccttcacagattctacaaaaacagttttccaagctgctctattgaaagaaaggtttaactctgtgagatgaatgcgcacatcacaaagcagtttctgggaaagcttcataataggtttcatctgaagatatttactttttcaccatgggcctcaactcccaaatatcacttcacagattgtacaaaaacagtgtttccaaactgctcaatcaaaagaaaggtttaactctgtgagatgaatgcccacatcacaaagcagtttctcagaatgcttctttttagttttcatctgaagatatttcctttttcacataggcctcaatgtgttcctaaatatcccttcacagattccacaaaatcagtgtttccaaactgatcaatcaaaagaaatggttaactctgtgtgatgaatgcacacatcacaaatcagtgtctcaaaaagcctttctgtggtttttatctgaagatatatccttttccaccataagcctcaaagtgttcccaaatatcctttagcagattctaacaaaacagtgtttccaaatgctaattcaaaagagaaatgcaaatcaaaatcacaatgagataccatctcacaccagttagaatggcaatcattaaaaagtcaggaaacaacaggtgctggagaggatgtggagaaataggaacacttttacactgttggtgggactgtaaactagttcaaccattgtagaagtcagtgtggcgattcctcagggatctagaaagagaaatacgatttgacccagccaccccattactggatatatacccaaagcattataaatcatgctgctataaagacacatgcacacgtatgtttattgcggcactattcacaatagcaaagacttggaaccaacccaaatgtccaactatggtagactggattaagaaaatgtggcatatgtacgccatggaatactatgcagccgtcaaaaatgatgagttcatgtcctttgtagggacatggatgaagctgaaagccatcattctcagcaaactatcgcaaggacaaaaaaccaaacaccgcatgttctcactcataggtgggaattcaacaatgagaacacatagacaaaggaatgggaacatcacatactggggcctgttgtggggtgggggaggggggagggatagcattaggagatatacctaatgctatatgatgagttaatgggtgcagcacagcaacatggcacatgtatacatatgtaacaaacctgcatgttgtgcacatgtaccctaaaacttaaaatataataacaaaatttaaaaaaaagagaatgttttaaatctgtgagatgaatgcacacataacaaagaagtttctcagaaagcttctttctatttttcatctagagatatttcctttttcaccataggcctcaaagtgctcccaaatatccctttacagattctacaaactcagtgtttccgaactgcttaatcaaacgaatgcttaaactctgtgggatgaatgcagacatcacaaagcagtttctcagacagcttcattatatttcttatttgaagatatttcctatttcaccatatgcttcaaagtactcccatatgtccctttacagattctacaaaaacagtgtttccaagatgctcaattaatagaaaggtttaatttggtgagatgaatggacacatcacaaagctgttaatccaaaacttctttctcgtttttatctgaagatattttttttttcaacataggcctcaatatgctcccatatattccgtgacagattatataaaaacagtgtttccaaactgctcaatcaaaagaatatttaactctgtgagatgaatgcacacatcacaaagccgtttctcagaaaacttctttctagtttttaaatgaagatactccctttttcaccataagcctcaatgggctcccaaataatcctttgcggattcaacaaaaacagtgtttccaagatgctcaataaaagaaagatttatctctgtgagatgaatgcgcatatcacacagcagttaatcagaaggcttctttctagtttttatgtgaagattatttcctttttcaccagaggcctcattgcattcccaaatatcccttcacagattccacaaaaatagtgtttccaaactgttcaataaaaagaaaggtgtcactctgtgagatgaatgcctacatcacaaagcagttcctcagaaagcatatttctggtttttatatgaggatatttcctttctcaccataggccacaatgagctcccaaatatcctttcacagattcttcaaaaacagtgtttcaaacggcttaatcaaaagaatgcttacacactgtgagacaaatgcagacataaaaaagcagtttctcagaaagtgtctttctagtttttatttgaagatatttcctttttaaccataggcctcaatgcactcccaaatatcccttggcatattctacaaaaacagattttccaaactgctcaatcaaaggaaagttttaactctgtgagatgaatgcactcattacaaagcagataatcagaaagcttccttctagttttaatgcgaagatatttcctttttcactataggcctcattgtgtttcaaaaaatcctgtcacagattctacaaatacagcgttaccaaactgctcaatcaaaagaaaggtgtcactctatgagatgaatgcacacatcacaaagcagttcctcaaaaagcatctttctggtttttatctgaggatatttcctttttcaccatcagcctcattacattccctagtatcctttcacagattctacaaaaacagtgtttcaaaactgcttaatcaaaagaatccttacactctgtgagacaaatacaggcataacaaagtagtttctcagaaagcgtctttctagtttttatgtgaagatattccatttttcaccataggcctcaatgcactcccaaatatccctttgaatattctacaaaaagagattttccaaactgctcaatcaaagtaaagttttaactctttgagatgaatgcgcacatcacaaggcagataatcagaaagcttctttctagtttttatgcgaatatatttcctttttgactgtagacctcattgcattccgaaaaatccctacacagattctacaaaaacagtgtttccaaactgctcaatcaaaagaagggtgctgctctgtgagatgaatgtacacgtcacaaagcagtgccttagaaggcatctttctggtttttatctgaggatatttcttttagcatcataggccccagtatgctcccaattatcctttcacagtttctacaaaaacagtgtttccaaactgcttcatcaaaagaatgtttacactctgtgagacgaatgcagacatcacaaagcagtttctcagaaagcttctttctagtttttatgtgaagatatttcctttctcaccatagacatcaaagtgctcccacatatcccttcacagattgtacaaaaaaagtgtttccaagatgctcaatcaacagaaaggattaattccgtgagatgaatggactcatcatctcacatctcacatctcacatctcacatctgattaacaaagctgttaatcagaaagcttctttctggtttttatctgagaatatttcctttttaaccataggtctcaaagggcttaaaaatatcccttcttagattttacaaacacactgtttccaaacttctcaatcaaaagaatagtttcactctgtgagatgaatgcacacatctcaaagctgtttctccaaaagattctttctggtttttatctgaagttatttccttattcaccataggcctcaatgtgctcccaaacatcctttcccagatcctacaaaaacagtgtttccaaactgctcaatcaaaggaaaggtttagctctgtgagatgaaagcacacatcgcaaactcattctgagatatctttctggtttttatctgaggatatttcctttttcactataggcctcagtaggttcccaaatatctcttcccagattctacaaaaacagtgtttccaaactgctcaatcaaaagaaatgtttaactctgtgagatgaatgcattaatctcaaagcagtttctcacaaagcttctttctagatttatctgaatatatttcctttttctctgtaggcgtcaaagcactcccaaatatcactttgctgaatctacaaaaacagtctttccaaactgcttcatgaaaaaaaaggattaactccgtgagatgcatgcacacatcacaaagcagtgtcacaaaaagcttatttctagtttttatgtgaagatatttccttttccaccattggcctcaaggcactcccaaatatcccttcgcagattgtacaaaaacagtctttccaagctgctatataaaaagaaaggtttaattctgtgagatgaatgtacacatcacaaagctgtttctcagagcacatctttctaatatttatgtgaagatatgtcctttttcaccattggcctcaatgtgctcccttatatcccttgacagattctataaaaacagtgtttccaaactgcctaatcaaaagaaaggtttaactctgtgagatgaataaatacatcacagagcactttctcacaaaacttctttccagtatttatgtaaagatatttcctttttcaccgtaggcctcaatgcactccaaaatatcccttcacagattctagaaatacacagtttccaaactgcttaatcaaaacaaaagattaactctgtgagatgaaagcacacatcacaaaactgtttctcagaaatctttctggtttttatctgatgatatttcctttttcaccatagacctcaatgctttcctgattgtccctttgcagatccaacaaaaacagtgtttccaaactgctcaatcagaagaaagttttaactcagagagacgaatgcacacatcacaaagcagtttctgggaaagcttctttctagtttttatgtgaagatattttctttttcaccatagggctcaaagagctcccatatatccattgacagattatattaaaacagtgtttccaaactgctcaatcaaaagaaatatttaactctctgagatgaatgcacacaacacaaatcagtttctctgaaatattctttctagtttttatgtgaagatgtttccacttccaccataggcctgaatgtgctccaaaatatccttcacagattctagaaacacaatgtttccaagatgcaccatcaaaggaaaggtttaactctgtgagatgaatggactcatcaaaagcagttagtcagaaagcttctttcaattttttatctgaggatattttctttttcaccataggcctcattgcattccgaagtatcctttcacagattccacaaaaacagtgtttccaagcttcccaataaaaaggaagctttatctctgtgagacaaatgcacacatcacaaagcagtttctcagaaagtgtctttctggtttttatgtgaagatatttccttttttcactctcagcctcaaagcgctcccaaatatcccttcacagattctacagaaacagtttatccaaactactcgatcaaaagaaaagtttaactctgtgatttgaatgcacaaattacaaagcagtgtctcagaaagcttctttctagattttatctgaggataattcctttttcaccataggcctcaatgtgctctcataaattccttggcagattctacaaaagcagtgtttccaaagagcaccatcaacagaaaatgtaactctgagatattaatttacacatcacaaagaattttctcagaaagcttctttctacttttcattggaagatattgtctttttcaccttggtcctcattgtgtttccaaatatccatttgcagattctagaaaaacacagtttccaaactgctcaatcaaaagaaaggattaactgtgtgagatgaaggcacacagaaacaaagctgtttctcagaaatctttctagtttttatgtgaagatatttcctttttcaccataggcctcattgcattcccaaatatcccttcacagattctacaaaaatagtgtttccaaactgctcaatcacaagaaatgtgtatctctgtgagatgaatgcacacatcacaaccagtttatcagaaagattctttctagtttttatctgagaatatttcctttttcaccattggcctcaaagggctcccaaatatcccttatcaaattctacaaaaacagtgtttccaaactgctcaatcaaaagaatattttaactctgtgagatgaatccacacatcacaaaccagtttctccaaaagaatctttctgttttttatctgaatgtatttccttttcaaccataggcctcaatgtgctcaaaaatgtcctttcccagatcctacaaaaacagtgtttcaaaactgctcaatcaaaggaatggtttaactttgtgagatgaatgcacacatcacaaagctgtttctcagaaatctttctggttatatctaagaacatttcctttttcactataggcctcaatccattcccaaatatcccttcgcagattctacacagtgtttccatactgctcaatcagcacataggttttactatgtgagatcaatgcatccgtcacaaagcagtttctcagaaagcttctttctagatttatctgaagatgtttcctttttctaagtaggcctcaaagcactcccaaatatccttcacagattctacaaaaacagtctttccaaactgctcaatcaaaaggaaggattaactctgcaagatgaatgcacacatcagaaagcagtttctcagaaagcttctttctaatttttatgtgaaaatacctcctttttcaacataggccttgaggaactcccaaatatccctttgcagattgcacaaaaaacagtgtttccaaaatgctaaataaaaagaaaggtttaactctgtgagatgaaagtacacgtcacaaatctgtttctcagaacacttctttgtagtatttatctgaagatatttcctttttcaccataggcctcaatgtgctcccaaatatccctttgcatattctagaaaaacagagtttccaaactacttaatcaaaggaaaagattaactctgtgacgtgaaagcacacaccatgaagctgtttcttagaaatctttctagtttttattgacgatatttcctttttcaccataggcctcaatgtgttcccaaatatccctttgcaggttctacaaaaacagtgcttccaaactgctcaatcagaagaaaggtttaactctgagagatgaatgcacacatcacaaagcagtttctcagaaagcttctttctagtttttatgtgaagatatttcctttttcaatgtagggctcaatgcttcccatatatccatggacagattatattaaaagagtgtttccaaacttctcaatcaaagaaatctttaactctgtgaaatgaatgtacacatcacaaagcagtttctcagaaatcttctttctactttttatgtgaagatgcttcttttttcaccataggtctcaatgtgctcccagaaatccttggcagatagtacaaaagcagtgtttccaagatgctcaatcaatggaaagattaaactccatgagatgaatggacacatcacaaagcagtcgatcagaaagctacttctaatttttatctgaggatatttcctttttcaccttaggcctcattgcattctgaagtatcctttcacagattctacaaaaacagtgttccaaggtgcccagtaaaaaggaagctttatgtctgtgagacaaatgcatacatcacaaagcagtttctcagaaagtatctttctggtttttatgtgaagatatttcctttttcaccataggtctaaatatgcttccaaatatcccttcatagattctaccaaaacagtattttcaaactgctcaatcaaaagaaaggtttagctctgtgagatggatgcacacatcagaaagcagtgtttcagaaagcttctttctagattttatgtgaagatatttctttttcagcataggcctcaatgtggtatcataaatcccttcacagactttataaaaacagtgtttccgaagcactcaataaaaagaaaatttaactctgtgagatgaatgcacacatcacaaagcagtttctcagaaaggttctttctagttttcatcagaagatattttctttttcaccataagcctcattgtgctcccaaatatcccttttcagattctagaaaaatacagtttccaaactcctcaatcagaagaaaagattaaccctgtgagatgaatgcacacatcacaaagcagtttctcagcaatctttctagtttttatgtgaagatatttcctttttcaccataggcctcattccattccaaatatcccttcacagattctacaaaaatggtgtttacaaactgctcaatcagaagaaaaagttcaattctgttagatgaatgtacccatcactaagcagtttctcatgaagcttctttctatatttatctgaagatattcctttttcacagtaggcctctatgctcccaaatatcccttcatggatcctgcataaacagtctttccaaactgctcagtgaaaagaaagtatttactcagtgggatgaatgcacacatcacacatcagtatctcaaaaagcttttttctggtttttatctgaagatatttctttttccaccataggcgtcaaggcactcccaaatatccctgtggagattctaacaaaacagtgttttcaaactgctcaatcaaaggaaaagtttatctctgtgagacgaatgcacacctcacaaggctgtttctcagaaagcgtctttctagtgtttatctgagcatatttcctttttcaccataggcctcaatgtgctcccaaatatcccttcacagattctaccaaatcagtgtttccaaactggtcaaacaaaagaaaactttaaatgtgtgagatgaatgcacacatcacaaaacagtttctcagaaagcatctttctggtttttacctgaggatatttccttttttgccataggcctcaatgtgatcccaaatatcctctcacagattcgacaaaaagtgtgcttgcaaactgctcaatcaaaggaatgcttaacctttgttaaacaaattcagacattacaagcaggttttgagaaatattctttgtagtttttatgtgaagatatttcccttttcaccataggcttcaatgtgttcccttatatcccttgaaacattctacaaaagcagtgtttccaaactgctcaatcaaaagacaggtttaaccctgtgagatgaatgcacacatcacaaagcagtttctcagaaaacacctttctggtttttatctgaggatatttctttttcaccttaggcaccagtgcactcccaaatatcctttcacagattttacaaaaactgtttccaaactgctaaatcaaaaggatacttaaactatgtgagacaaatgcagacaacccatagcagtttctcagaaagcttctttctagtttttatgtgaagatatttcctttttcacccaagtcctcaatgtgctccaaaatacccttcacaggttctaccaaaatagtgtttctaagatgctcaatcaaaaaaaggtttaactctgtgagatgaatgtacacctcacagagcagttaatcagaaagcttctttctaagttttgtctgaggatatttcctttttcaccacaggcctgattgcgttcctaagtatacttttgcagattctagcaaaacagcgtttccaaactgttcaataaaaaggaagttttatctctgtgagatgaatgcacacatcacaaagcagtgtctcagaaagctcctttctagtttttatctgaagatatttcctatttcaccagattcctcaatgtgctcccaaatgtcccttcacagattctacaaaaacagtgtttccacactgctcattgaaaagaaaggtttaactctgtgagatcaatgcacacttcacaaacagattcttggaaagcttctttcaagttttcatttgaagatatttcctttttcaccataggcctcaatgtgtacccaaatatcccttcacagattctacaaaaagagtgtttccaaactgctcaaaggaaatgttttaccctgtgagatgaatgcacagatcacaaagcagtttctcagaaagcttctttctagtttttatctaaaaatatttccttctccaccattggcctcaatgcgctccctaatatcccttcacggattctagaaaaacagagtttccaaactgcttaatcaaaagaaaggattaactctgcgagatgaaagcacacatcacaaaactgtttctcagaaatctttctattttttatctgaggatatttcctttttcaccataggcttcaatgcgctcccttagatcccttgatagatactacaaaaacagtgtttccaaactgctcaatcagaagaaagatttaactctgtgaggtgaatgcacacatcacagagcagtttctcagaaagcatctttctggtgttgatctgacgatatttcctttttcaccacaggcttcaatgcactcccatatatccattgacagattctgtaaaaacagtgtttccaaacttctcaatcaaaagaaatgtttaactctgtgagatgaatgcattcatcacaaagcagtttctcagaaagcatctttctggtttttatctgaggttatttctttttcaccttaggccccaatgtgctcccaaatatgcttttgcagattctacaaaaaccgtttttccaatctgcttaatcaaaagaattcataaacactgtgagacaaatgctgacatcacgaagtggtttctcagaaagcttcattctagtttttatgtgaagatatttcctttttcgccaaaggcctcagtgtgctccaacatatcccttcacagattgtacaaaaacagtgtttccaagatgctcaattcaaagaaagttttacctctgtgagatgaatgtacacatcacaaagcagttaatcagaaatcttctttctagtttttgtctgaggatatttcctatatcaccataggcctcattgcattccccagtatactttcacagatcctacaaaaacagtgtttccaaactgctcaatcaaaagaaagcaatatctctgttagtcaaatgtacacatcacaaagcagtttctcagaaagtgtctttctagtttttatgggaagatatttactttttcaccataggcctcaatgcactccaaaatatcacttcgcagattctacaaaaacagtgtttccaaactgctcaagcaaaagaaaattttaactctgtgagatgaatgcactcatcacaaaggagattctcagaaagattctggctagttttttctgaagatatttcctttttccctaaaggcctcatagcgctcccaaatatcccttctcagattctacaaaaacagttttgccaaactgctcaatcaaaggaaatgtttaattctcttttaagaatgaattcttcacaaagcagtttctcaggaagtttctttctacttttcatctgaagatatttcctatttcaccataggcctcaaaatactccctaatatccctttgcagattctacaaaaacagtgcttccaaactgttcaatgaaaagaaaagtttaattctttgagatgaatccacacatcacaaagcactttctcagaaagctactttgtagtttttatctgaggatatttctttttcactgtaggcctcaatatgctcctaaatatcctttagcagattgtacaaaaacactatttccaaactgctctatcaaaagaaagttttaactctgtgagaagaatgaacatatcaaaaagcagattctcagaaaggtgctttcaagtttttacctgaggatattcccttttccaccatagccttcaatttaatcccaaatatcacttagcagattctccaaaaacagtgtttccaaactgctcaatcaaaagagagcttgaactctgtgagaccaatgcaaacatcacaaagcaatttctcagaaagactccttctagtttttatgagaagatatttcccttttccgcctaggcctcaatgctctccatatatcccttggaacagtccacaaaaacactgttgccaaacttctcaataaaaggtaagtaaaaactctgtgagatgaatgcacacatcagaaagtaatttgtcagaatgcatatttctagtttttatcaagggatatttcctttttcatgatatgattgtaagtgctccaaaatatcccttcacagattctataaaaacagtgtttccaaattgctcaatcaaaagaaaggcttaagcctgtgaaatgaatggactcatcacaaagcagtttctcagaaagcttctttccagtttttatctgaatatatttctttgttcaacatagacctcaactgctccaaaatgtcccgtcgcagattctacataaacagtgtttcaaaactgctcaatcaaaagaaaggtttaacactgggagatgaatgcaatcattacaaatcattttcccaggaaggttctttctagtttttatctgaagatatttcctttttcaccataggcctcaatgtgctcccttatatccctttgtagattctgcaaaaacagtgtttccagaaggctcaatcaaaaaaagatttaactctttgggaagaatgcacacataacaaagccatttttgagaaagctcctttctagtttttatctgaagatatttcctttttcaccatgggcctcagcacgctcacaaatatcccttcacagattctatgaaaacattgttgccaaactgttcaatcgaaagaaatgttgaactccttgatatgaatgtactcaagactaagcactttctcagaaagcttctttctagtttttatctgaagatatttaccttttcaccataggcctcaacatgctcccacatatcccttagcagattctgcaaaacagtgttttcaaactgcttattcaaaagaaagttttaactctatatgataaatccactcttcacaaagcagtttctcagaatgcttctttctagttttaatctgaagataattcctttttcaccataggcctcaatgtgttcccgaatatctcttagtagattttgcagaaacagtgtttcccaactgctcaatcaaaattatgttttaacactgtgagatgaatgtacacataagaaagcaggttccagaaagcttctttctagtttttacctgaagatatttcctttttcaccataggcatcaaggtactcccaaatatgccttctcagattctccaaatcactgttcccaaactgctcagtcaaaagaaaggtttaactctttgagatgaattcactcatcacaaagaagtttctccaaaagcttctttctaggttttctctgaagatatttctattttcaccattggcctcaatgcggtataaaaatcccttcctagattctacaaaaacagcatttctaaactgctcaatcaaaagaaagatttaattctgtgagaggaatgcacaaatcacaaaccagtttctgaaaaagctttttgccagtttttgtctgaagatatttccttttgcaccataggcctcaatgtgctcctaaatatcccttcacagattctaccgaagctgtgtttccaaagtactcaattgaaagaacagtttaactctctgagatgaatgcacacatcaaaaatcagttttccagaatgcttctttctagtttttttctgaagatatttcttttttttaccatagacctcaatgcattcccaaatatcccttggtagattttacagaagcagtgtttccaaactgctcaatcaaaataatggtttaactatgtgagatgaatgcacaaatcaaaaagcagtttctgagaaagtttcttcctagtattaatctgaaaatatttccttgctcaccattggcctttaagtgcttccaaatatcccttctcatattccacaaaagctgtgttgtcaaactggtcaatcaaaagaaaggtttaactctgtgagatgaatgcactcatcacaaagcagtttctcagaaagcttctttctaatttttaactgacaatatttcctttttcaccctaggcctccatgcgctcccaaatatcccttggcagattttaccaaaacagtattaccaaaaggctcaatcaaaagaaagttttaattctgtgagatgaatgcactcatcaaaaagcagcttctcagaaagcttcgttctaagtttttatctgaagatatttcctttttcaccataagccccaatgtgctaccaaatatcccttcgcagattccacataaacagtgtttccaaacagttcaatcaaaagaaaggtttaactctatgagatgaatgcactcatccaaagcagtttcacagaaagcttctttctaatttttatctgaagatatttccttttaaacaataggcctcaatgcactcccaaatatcccttcacagattctactaaaacagtatttccaaatggctcaatctaaaggtttaactctcttagatggatgcacacttcacaaagcagtttctcagaaagcttctttctggtttttgtctgaagatatttcctttttcaccattggcctcagtgggctatgatacatcactttgtagactctataaaaagtgtttcaagactgctcaatcaatagaaagttttatctctgtgagaagaatgcacatatcacaaaggggtttctgagaaagtttctttctagtttgtatctgaagatatatcctttttcaccgtagacctcaatgcattcccaaatgtctctttgcagattatacaacagcagtgtttacaaactgctcaatcaaaagaaaggtttaactctgtgagatgaatacacacatcacaaagcagtttctcaaaaagcttctttctagtttttatatgaagatatttcctttttctccataggcttcaaagtgctcccaaatatccctaggcagattccacaaaaacggtgttgccaaactgcccaatcaagagaaagttttaactctgtgagatgaatgcactcatcacaaagtagtattgcagaaaacttctttctagtttttatccaaagatatttcctttttgaccataggcctcaatgtgctcccaaatatacctttgcaaattctacaaaacagcgtttccaaaccactcagtgaaaagaaagttttaactcagtatgatgaatgcacatttctcgaagcagtttctcagaatgcttctttctagtttttatctgaagatatttcctttttaaccacaggcctcaatgcactcacgaatatccccttgcagattacacaaaaacagttcttccaagccattgaatcaaaaaaaaacaaaaagatttaactctgtgagatgtatgcacacatcccaaagcagtttcccagaaagcttctctctagtttttatctgaagttatttcctttttcaccataggccttaaagcactacgaaatatcctttctcagattccatgaaaacagtgttgtcaaacttctcaatcaaaataaaggcttcactctgtgagatgagtgcactcatactaatcagtttcccaaaaaggtctttctagtctttatctgaatatgtttcctttttaaccataggcctcaatgcactcccaaatatcccttcacagatactacgaaaacagtgtctccaaacagagcaatcaaaagaaaggtttaactatgtgagatgagtgcacacatcacaaagcattttttttcagaaagcttctttctagtttttctctgaatatattttgtttcaccatagtcctcaatgagctcccatatatctctcgtagatttgaaaaaaacaggtttccaaacagctcacactaaagaaaagtttaaccctatgagaagaatgcacacatcacaacgcggtttctgagaaagcttctttctagtttttatctgcaggtatttcctttttcaccacaggcctcaaagcgctcccaaatattcctttgcagattatacatgaacagtgtttaaaaactgctcaatcaaaagacagttttaactttgtgagatgaatgcacacatcacaaagcagtttcccagaaaggttctttccattttttatctgaagatatttgctttttcaccataggcctaaaagcatcccaaatatcccttctcagactctacaaaacagtgttgccaaactgctcaatcaaaagaaagttttaactctatgagttgaatgcacacactaccaagcagtttaccagaaagattctttatattttttatctgaagatatttcctttttcaccatagaccttaaagcacccccaaatgtcctttcacagatggcacaaaaacagggttgccaaactgcttaatcaaaagaaagttttaactctgtgagatgaatgcattcaacacaaagcagtttctcagaaagcttctttctagtttttatctgaagatatttcctttttcaccataggcctgaatgcactcccatatatccctttgtagagtctacaaaaatgtgtttccagatggcttaatcaaaagaaaggtttaactctgtgagtagaatgcacacatcacaaattgttttctgagaaaccttctttccagtatttatctgaaaatatttcctttattaccttaggcctcaatgcactctcaaatatcccttcacagattctacgaaaacagtgtacccaaactgctcaattaaaagaaaggttcactctgtgacatgaatgcacacagcacaaagcagtttctcagaaagcttctttctagtttttatctgaagttatttcatttctcattataggcctgaaattgctcctaaatatcccttctcagatccttcaaaaacactgttgccaaactgctgcgtcaaaagaaaggtttaactttgtgagattaatgcactcatcacaaagcagtttctaagaaagcttctttctagtttttatctgaagatatttcctttttcaacataggcctcaatgtgctctgaaatatccctttgctgattctaccaaaagagtgattccaaacagctcaatgaaaagaaagctttaactctgtgagacgaatgctcacatcacaaaccagtttctcagaaatcctgtttctgtttgtctctgaagatatttcctttttcaccacaggcctcaatgcactcccatatatcccttcctagattctacaaaaacagtgtttccagactgctcaatcaaaataaatgcttaactctgtgagaagaatgcagacaacacaatgcagtttctgaaaaagtttctttctagtttttctgaagatattttctttttcactataggcctcaatgcgctcctatatatcctttcatagattctacaaaaacagtgtttccagacttctcaattgaaagaagggtttaactctgtgagaagaatgcacacatcacaaaagagtttgtaagaaagcttctttcttgtttttctctgaggatatttcctttttcaccacacgccacaatgcacaacaatatgtcccttcagagatctacaaaaacagtgtttccaaactgctcaattaaaagaaagatttaactctgtgagaaaaatgcacacatcacaaagggtttctgagaaagttactttgtaatttttatctgaagatatttcatttttcatctaaggcctcaatactctcccaaatatcccttcacagattctacaaaaatagtgtttccaaaatgctccatcaaaagaaaggtataagtctgtgagaagaatgcacacatcacaaagtggtttctaagaaagatgctttctaagattcatctgaagatatttcccttttcaccattggcctcaatgcgctccaaaatatcctttcacagattctacaaaaacagtgtttccaaattgctaaatcaaaagaaaggtttgactctctgagatgaatgaactcatcacaaagcagttactcagaaagcttctttctagtttttttctgaagatatttcctttttcaacataggcctcaaaatgctcacatatatccctccacagattctacaaaaagagtgttgccaaactgctcaatcaaaaggaaggtttaactctgtgagatgaatgcacacatcagaaagtagagtctcagaaaatttgtttctactttttctctgaagatatttcatttttcaccataagactaaaatatctcccatatattccttcgtagattgtacaaaaacagtgtttccagactgctcaaccaaaggaaaggtttaactctgtgagaagaatgcacacatcacaaagcagtttctgagaaagcttctttctagtttttatctacagatatttcctttatcacggtaggcctcaatgcactcccaaatctctttgcagattctatggaaacagtgtttccaaactgctcaaaagaaaggtttaaacctgtgagatgagtgcacacataatagaacagtttccagaaaccttctttccagtttttatctaaagatatttcatttttcaccataggcctcaaagcactcccaaatatccctttgcagattgtacataaacagtgtttccaaacagctcaagcaaaagaaaggattaactctgtgagatgaatgtacatatcaaaagcagtttctcagaaaacttctttctagtttttgtctgaaggtatttcctttttcaccataggccttgaagcactcccaaatataactttgcagattctacaaaaacagagttgccaaactgtgccttcaaaaattggtttacctctgtgagatgaatgcattcatcaccaggcagtttctcagaatgattctctatagttttgatctgaagatattttcttttctacaataggactcaatgtgctcccaaatatcccttcgcagtttccacaaaaacagtgtttccaaactgctcaataaatataaagttttaactctatattatgaatttgcacatcacaaagcagtttctcagaaagcttctttctagtttttatctgaagatatttcctttttcaccataggcctcaatgcactcccagtatcccttggtagattttacagaatcagtgtttccaaactcttcaatcaaaatatggtttaacattgtaagatcaatgtacacatcacaaaacaggtttctgaaggcttctttctagtttttatctgaagatatttcttttttcaccataggctctgaagcgctcccaattattccttcacagattctacaaaaacagtacttccaaactgctctatcaaaagcaagttttaactctgtgagaaggatgcactcatcacaaagcagtttctctgaaagattctttctagtttttatgtgaagacatttccattttcaccctaggcctcaatgcactcccaaatatcccttcatagtttctagcaaaacaggttttccaacctgctcaataaaataaaggttcaactctctgtgatgaatgcacacatcaccaagcagtttttgagaaagcttctttctagtattttcctgaagatatttcgtttttcaccgtaggcctcaatgctgtcccaaatatcccttcacagattctacaaaaacagtgtttccaacctgctcaatcaaaagaaaggtttcactctctgagaagaatgcacacatcacaaagcagtttctgagaacagttttttctattatttatatgaagatatttcgtttttcaccataggcctcaatggctccaaaatatcccctcacagattctacaaaactggggttccaaattgctcaatcaaaaaaattttaactctatatgatgagtatgcacatcacaaagctcagaatgcttctttcttgtatttatctgaagatgtttcctttatcaccttaagcctcaatgcactcccaagtatcctatgacagattttacagaaacagtgtttccaactttcccaatcaagataatggtttaactctgtgagacgaatgtacacatcacaaagcaatttccagaaagcttctttctagtttctatctgaaaatattacttttttcaccataggcctcgagtcctcccaaatatccctttgcagatttataaaaacattgtttccaaactgctcaatcaaaagagacgtttaattctgtgagatgaatgcacttatcaacaagcagtttctcagaatgattctttatagtttttatctgacggtatttcctttttcaccaaaggcctcaatgtgctcccaaatatccctttgcagattctacaaagcagtgtttccaaactcctcaaccaatagaaagttttaactctttatgatgaatgtgcgcatcacaaagcggtttctctgaaagcttctttctagtttttatctgaaggtatttcaattttcagcataggcctgaaagtgctcccaaatatccctttgtagattctacagaaacagtgtttccaaactgctcaatcaaaagacagtttttagtctgggagaagaattcagtcatcaccaagcagtttctcacaaagcttctttctagtttttatctgaaggtatttcctttttcaccataggtcccaaagcattcccaaatatccctttgaagattctacgaaaacagtgtttccaaacttctcaatcaaaagaaaggtttaactctgtgagatgaacgcacacatcacaacgcagtttctcagaaacattctttctagtttttctctaaagatatttcctttttcactttaggccttaatacgctcccagatatcccttcatagattatacataaacagtgtttccagactgctcaatcaaaagaaagctttaacactgtgaaagtaagacacacatcacaaagctgtttctgagaaagcttctttctactttttgtctgaaaatatttcctttttcaccatagacctcagtgtgctcaaaaatgtcctttcatggatgctacaaaaatagtgtttccaaatagctcaatcaaaataaaagtttaaccctgtgagatgaatgcattcatcagaaagtagttttccaggaagcttctttctagtttttatctgtagatatttatttcctttttcaccataagccttgaagcactcccaagtatctcttcacagattctacagaaacagcattgtcaaactgctcaatcaaaaaaaaagtttaagtctgtgagatgaatgcactcatcaccaagcagtttctcagaaagcttctttctagtttttatctgaatatatttcattttttacaataggcctcaatgtgctcccatatttcccttcacagattctacaaaaacagtgtttccaaagtgcttgatcagaagaaaagtttaattctgtgagaagattgcacacatcacaaagcagctgctgggaaagtttctttctagtatttatgtgaagatatttcctttttcaccatatgcctcaatgcacacctaaatgtcccttcccagattctacaaaaacagtggttccaaactgctcaatcaaaaaaaaggttttactctgtgggatgaattcactgatcacaaagcagtttctcagaaagctcctttctagtttttatctgaatgaatttcctttttctccataggccctaatgcactcccaaatatcccttcacagattctacgaaaacattgtttccacactgctccaacaaagtaatttttaactctgtgaaaagagtgcacacatcacaaagcagttttgacaaggtttctttctggtttttatctgaagatatttcctttttcaccataggccccaaagtgctctgaaatatccctacacagattctacaaaaacagtgttgccaaactgctcaataaaaaaaaaaagttttaactctgtgagatgaatgcactcatcaccaagcagtttctcagaaagcttctttctggtttttatctgaagctattacctttttcaacacaggcctcaaagcgctcccaaatatccctttgcagattctacaaaaacagtgtttccagactgctcaaacaaaataaaatcttaactctatgtgatgaattcacacatctggagcagtttctcagaatgctactttctagttttttttttttttctttttgagacagagtcttgctttgtctcccaagctggagtgcagtagtgcaatctcggctcactgtaagctctgccttccgggttcacaccattcttcctcagcctcctgagtagctgggactacaggcgcccaccaccatgcccagctaatttttttgtatttttagtagagactgggtttcactgtgttagccaggatggtctcgatctcctgacctcgtgatccaccctcctcggcctccaaaagtactgggattacaggcatgagccaccgcaccgggccctgctactttctagtttttatctaaagatatttcctgtttcacctatggcttcaatgcagtcccaaatttcccttggtagattttacagaaacagtgtttccatagtgctcaatcaaaataattatttacctttgtgcaaggaatgtacacatcacaaagcagtttccagaaagcttcttttctgtttttatcagaagatatttcattttcaccacaggccttgaagcgctccaaaatatcccttcgcagattctacaaaaacagtgtttctaaactgctcaagcaaaagagaggttttactctgtgagatgaatgcactcataaaaatatggtttctcagagagcttacttctagtttttatctgaagatattttctttttcaccataggcctcaatgcgctcccaagtataccttcacagatactaccaatacagtatttccaaaatactcaatccaaagaaaggtttaattctgttagatgaatgcacaaatcacgaagcagtttctgagaaaccttctttctagtttttctctaaagatatttccttattcaccataggcctcaaagcattaccaaatatcccttcacagattctacaaaaacagtattgccaaaccacgcaatcaaaaagatttaactctgtgagatgaatgcactcatcaccaagcagtttctcaaaatgactctttccacttttaatctgaagatatttccttttcaccataggcctcagcacactcccagatatcccttcgcagattctacaaaaacagtggttccaagctgctcaatcaacagacagttttaactatatatgatgaatgtgcacatcacaaagcagtttctgagaaagcgtctttctagcttttatctgaagatacttccttttgcaccatgggcctcagtgcactcccaaatataccttcatagattctaccaaaacagtgtttccaaactgctcaatcaaaagaaaggtttaactctgtgagatgaatgcacacatcacatagcagtttctcagaaagcttttttctagtttttccctgaagatatttcctttttcactatatgcctcaatgagctcccctatacctcttcctagatactacaaaaacagtgtttccaaactgctcaatgaaaggaaagttttaactctatatgatgaatggacacatcataaagcactgtctcagcatctgtctttctactttttatctgaagatatttcctttttcaccattgacttcaaagtactccaaaatatctcctcgcatattctaccaaaacagtgtttccaaattgctcaatgaaaagaaatatttaactctctgagatgaatgcactaatcattaagtagtttcccagaaagcatctttctagtttttacctgaagatatttcctttttcaccatagtccccaatgccctcccaaatatcccttcacagattctaccaaaacagtgtttccaaactgctcaaccaaaagaaaggtttaactctgtgagatgaatgcacacatcacatagcagtttctcagaaagattttttctagtttttccctgaagatatttcctttttcactataggcctcaatgagctcccctataacccttccgagatactacaaaaacagtgtgtccaaactgcttaatcaaagaaaggtttaactctgtgagatgaatgcactcatctcaaagcagtttctcataaagcttctttctagtttttatctgaagatatttctttttcaccataggcctgaatgcactcccaaatatcccttcacagattctaccaaaacagtgtttccagacttctcaatcaaaagaaagttttaattctatgagaagaatgcatacataataaagcagtttctgataaagcttctttctagtttttatctgaatatatttcctttttcatcacaggcctcaaagagctcccaaatatcccttcacagatcctaccaaagcattgtttccaaactgatcaatcgaaagaaaggtttaatgctttgagatgaatgcacacatcacatagcagtgtctcagaaaactttctactttttctctgaagttatttcctttttcaccatagcatcaacgtgattccaaatattccttcacagatactaccaaaacagtgtttccaaaatgctcaatcaaaagaaaggtttaactctgtcatttgaatacacgcatcacaaaacaacctctcagaaagcttccttatactttctcactgcagatattttgttttctaacataggtctcaatgcgctcccaaatataccttcgcaaatattataaaaacaatgttttcaaactgcttaatcaaaagaaagttttaagtctgtgagatgagtgtactcatcacaaagcagtttctcagaaagcttctttcaagtttttctccaaagatatttcctttttcaccatagccctcaacgtgctccaaaatgtcaatttaaaggttctacaaaaccagtgtttccagacagctcaatcaaaagaaaggtttaactctgtgagataagtgcacacatcatttagaagtttcccagaatgcttgtttctagtttttatcttaagcgatttcctttctcaccataggccttaaagcactgccaaatatcctttctcagattctacaaaaaaacagtgttgcaaaactgctccatcaaaggaaaggtttaactctctgtgatgaatccactcatcacaaagtagtttctcagaatgcttcttactagtttttatctgaagatatatgttttttcaccataggcctcaatgcgctcccaaaaatccctttgcaggttctaccaaaacagtgtttccagactgctcaatcaaaagaaagatttaactctcttagaagaatgcacacctttgtggagccaagttggctgaaaaggaactgctccagtctacatctcccagcatgagtgacacagaagacgggtgatttctaaggtcaaactgggtggagcccaccacagctcaaggaggcccgcttgcctctgtaggctccacctctgggggcagggcacagactaacaaaagacagcaataacctctgcagacttaaatgtccctgtctgacagctttaaagagagtagtggttctccaagcacacagcttgagatctgagaacgggcagactgcctcctcaagtgggtccctgatccctgagtggcctaacaaggaggcaccccccagtaggggcagactgacaacacacaggaccaggtactcctctgagacaaaacttccagaggaacgatcaggcagcagcatttgcacttcaccaatatctgctgttctgcagcaaccactgctgatacccatgcaaacagtttacggacatccagcaaactccaacggacctgcaggtgagggttttgactgttagaaggaaaattaacaaacagaaaggacatccaaaccaaaaacaaatctgtacatcactatcatcaaagaccaaaggtagataataccataaagatagggaaaaaacagaccagaaaaactagaaacgttaaaaatcagagtgcctctcctcccccaaaggaacgcagctcctcaccagcaatggaacaaagcaggatagagagtgactttgatgagctgagagaagaaggcttcagacaatcaaactactctgagctaaaggaggaagtaagaaccaatgacaaagaagttaaaatctttgaaaaaaaaattagacgaatagctaactagaataaccaatgaagagaagtacttaaaggacctgatggagctgaaaaccacggcatgagaactacgtgacgaatgcataagcctcagtagctgatgcgatcaactggaaggaagggtatcagtgatggaagatgaaatgaatgaaatgaagtgtgaagagaagcttagagaaaaaagaataaaaagaaacaaagcctccaagaaatatgcgactatgtgaaaagaacaaacccacgtctgattagtgtacctggaagtgacagggaaaatggaaccaagttggaaaacactctgcaggatattatccaggagaactttcccaatcttgcaaggcaggccaacattcagattcaggaaatacagagaaggccacaaagatactcgttgagaagagcaacttaaagacacataattgtcagattcaccaaaattgaaatgaaggaaaaaatgttaagggcagccagagagaaaggttgggttacccacaaagggaagcccatcagactaacagcagatccctcgccagaaactctacaagtcagaagagagtgggggccaatattcaacattcttaaagaaaagaattttcaacccagaattttatatccaaccaaactaaccttcataagtgaaggagaaataaaatactttacagacaagcaaatgctgagagactttgtcaccaccaggcctgccctaaaagagctccaaatagaagcactaaacatggaaaggaacaaccggtaccagccactgcaaaaacatgccaaattgtaaagatcttcaaggctaggaagaaactgcatcaattaacgagcaaaataaccagctaacatcataatgacaggatcaaattcacacataacaatattaactttaaatataaatgggctaaatgctccaattaaaaggcacagactggcaaattggataaagagtcaagacccatcagtgtgctgtattcaggaaacccatctcatgtgcagagacacacataagctcaaaataaagggatggaggaagatctaccaagcaaatggaaaataaaaaaaggcaggggttgcaatcctagtctctgataaaacagactttaaaccaacaaagatcaaaaaagccaaaaagaccattacataatggtaaaggaatcaattcaacaagaagagctaactatcctaaatacatatgcacccaatacagaagcacccagattcataaagcaagccctgagtgacctacgaagagacttagactcccacacaataataatgggagactttaacaccccactgtcaacattagacagatcaacgagacagaaagttaacaaggatatccaggaattgaactcagctctgcaccaagcagacctaatagacacctacagaactctcaaccacaaatcaacagaatgtactttgttttcagcagcacaccacacctattccaaaattgaccacatagttggaagtaaagcactcctcagcaaatttaaaagaacagaaattataacaaactgtctctcagaccacagtgcaatcaaactagaactcaggattaagaaaatcactcaaaactgctcaactatattgaaactgaacaacgtgcccctgaatgcctactgggtacataatgaaatgaaggcagaaataaagatgttctttgaaaccaacgagaacaaagacataacataccagaatctctgggacgcattcaaagcaatgtgtagagggaaatttatagcactaagtgcccacaagagaaagcaggaaagatccaaaattgacaccctaacatcgcaattaaaagaactagaaaagcaagagcaaacacattcaaaagctagcagaagacaagacataactaagatcagagcagaactgaaggaaatagagacacaaaaagcccttcaaaaaatcaatgtatcccagagttggtttttgaaaagatcaagaaaattggtataccactagcaagactaataaagaagaaaagagagaagaatcaaatagacacaataaaaaatgataaaggggatatcaccactgatcccacagaaatacaaattatcatcagagaaaactataaacatctctacacaaataaagtagaaaatctagaagaaatggataaattccttgacacatacatcctcccaaaactaaaccaggaagaagttgaatctctgaatagactgataacaggatctgaaattgaggtaattattaatagctttccaaccaaaaaaagtccaggaccagatggattcccagccgaattctaccagaggtacaaggaggaagtggtaccattcctcctgaaaatattccaataaatagaaaaagaaggaatcttccctaactcattttatgaagccagcatcatcctgataccaaagccgggcagagacaaaacaagaacagagaattttagactaatatccttgatgaacattgatgcaaaaatcctcaacaaaatactggtaaaccgaattcagcaacacatcaaaaagcttatccaacatgatcaagtgggcttcatccctgggatgcaaggctggttcaacatacgaaaatcaataaacataatccagcatataaacagaatgaaagacaaaaaccacatgattatctcaatagatgcagaaaaggcctttgacaaaattcaacaacgcttcatgctaaaaactctcaataaattaggtattgatgggacgtatctcaaaataataagagttatctatgacaatcccacagccaatatcatactgaatggacaaaaactggaaacattccctttgaaatatggcaaaagacagggatgccctctctcaccactcctattcaacatagtgttggaagttctggccagggcaatcaggaaggacaaggaaatacacggcattcaattaggaaaagaggaagtcaaataattgtccctgtttgcagatgacatgattgtatatctagaaaaccccactgtctcagcccaaaatctccttaagctgataagcaacttcagcaaagtctcaggttacaaaatcaatgtgcgaaaatcacaagcattcttatacacaaataacagacaaacagagagccaaatcatgagtgaactcccattcataattgcttcaaagagaataaaatacctaggaatccaacttacaagggatgtgaaggaccttttcaaggaaaactacaaaccactgttcagtgaaataaaagaggatacaaacaaatggaagaacattccatgctcatgggtaggaagaatcagtatcatgaaaatggccatactgcccaagataatttacagattcaatgccatccccatcaagctaccaatgactttcttcacagaattggaaaaaactactttaaagttcatatggaaccaaaaaaagagcccacattgccaagtgaatcttaagccaaaggaacaaagctggaggcatcacgctacctgacttcaaactatactacaaggctacagtaaccaaaacagcatggtactggtaccaaaacagagatatagaccaatggaacagaacagagccctcagaaataatgttgcatatctacaactatctgatctttgacaaacctgagaaaaacaagcaatggggaaaggattccctatttaataaatggtgctgggaaaactggctcgcgagaagtaaagagctgaagctagatccgttctttacacgttatacaaaaattaattcaagattgattagagacttaaacgttagacctaaaaccataaaaaccctagaagaaaacctaggcattaccattcaagacataggcatgtgcaaggacttcatgtctagaacaccaaaagcaatggcaacaaaaacaaaagttgacaaatgggatctaattaaactaaagagcttctgcacagctaaagaaactaccatcagagtgaacaggcaacctagagaatgggagaaaatttttgcaagctactcatccgacaaagggctaatatccagaatctacaatgtacccaaacaaatttacaagaaaaaaacaaacaaccccatcaaaaagtggacgaagtatatgaagacagacttctcaagagaagacatttttgcagccaaaaaacacatgagaaaatgctcataatcactggccatcagagaaatgcaaatcaaaaccacaatgagataccctctcacaccggttagaatggctatcattaaaaagtgaggaaacaacaggtgctggagaggatgtggagaaataggaacacttttacactgttggtgggagtgtaaactagttcaaccattgtggaagttagtgtggcgattcctcaggaatctagaactagaaataccatttgactccgccatccgattactgggtatatgcccaaaggattataaatcatgctgctataaagacacatgcacacatatgtttattgcagcactattcacaatagcaaagacttggcaccaacccaaatgtccaacaatggtagactagattaagaaaatgtgacacatatacaccatggaatactatgcagccataaaaaatgatgagttcatgtcctttgtaaggacatggatgaaactgaaagccatcattctcagcaaactattgcaaggacaaaaaaccaaacactgcattttctcactcataggtaggaattgaacaataagaacacatggatagagtaaggggaacatcacacactgtggactgttgtgggtgggggaaggggggagggataacgttaggaggtatacctaatgctaaatgacgagttaatgtatgcagcacaccaacatggcacatgtatacatatgtaacatacctgcacgttatgcacatgtaccctaaaacttaaagtataataataataaaataggaaaagaagaatgcacacatcacaaagccttttctgagaaagcttatttctagtttctatctttagatatttcctttttcaccattggcctcagtgcgctcccaaatactccttcatagatgctaccaaatcagtgtttccaaagtgtttagtcaaaagaaagctttaactctgtgagatgaatgcacacatcacaaagaagtttctcagaaagcttttttctagtttttctctgaagatatttcctttttcaccataggcctcaatgtgatcccaaatatccctttgcagattccaccaaaacagtgtttccaaactgctaaaccaaaagaaagctttaactctgtggtttgaatgcacacaataaaaggagtttctcagaattctttctagtttctcactgcagatatttcctttttcaccataggcctcaatgagctcccaaatatcccttcacagattctccaaaaacaatgttttcaaactgctcaatcaaaagaaaagtgtaactctgtgagatgaatgcatacatcacgaagtggtttctgagaaagctcatttctcatatttatctgaatatatttcctttttcaccattggcctcaatgtgctgtcaaatatcccttctcacattctacaaaaactgttgccaagccactcaatcaaataaaagtttaactctgtgaaatgaacacaagcatcacaaagcagtttctcagaaagcttctttttaattttttttgaagagatttcctttttcactgtaggcctcaaagcactccaaatgtcaatttgcagattctacaaaatcagtgtttccaaacagctcaatcaaaagaaaggtttagctgtgtgagataaattcacacatcatgaagcagtttcccagaaagcttctttctagtttttatctgaagatctttcctttttcaccataggccttaaagcacttccaaatatcccttctcagattctacaaaaaaacagtgttgccaaactgctccatcaaaagaaaggtttaactctgtgagatgagtgcactcatcacaaagtagtttctcagaaagtttctttctagtttttatctgaagatatttcctttttcaccataggcctcaatgtgctcccaaaaatcccttcacagattctaccaaaacagtgtttccagactgcttaatcaaaaggaagatttaactctgtaagaagaatgcacgcatcacaaagtggtttctgagaaagcttctttctaatttctatctttagatatttcctttttcaccattggcctcagtacgctcccaaatattccttcgcagatgctaccaaatcagtgtttccacagtgcactatcaaaagaaagttttaactctgtgagatgaatgcacacatcacaaagaagttcctcagaaagctttatttctagtttttctctgaagatatttcctttttcactgtaggcctcaatgtgagcttaaatatccctttgcagattctaccaaaacattgtttccaaactgctcaatcaaaagcaagttttaactctgtgatctgaatgcacacaatacaaagcagtttttcagaattcttctttctactttctcactgcagacatttcctttttcaccataagccccaatgagctcccaaatatcccttcacagattgtacagaaacagtgttttcaaactgctcaatcaaaagaaaagtttaactctgtgagatgaatgcatacatgacaaagcagtttctgagaaagcttcttactagtttttatctgaagatatttcctttttcaccataggcctcactgcactcccatatatccctttgcagattctaccaaatgagtgttttcaaactgctgaatcaaaagaaaggtttaactctgtgagatgagctgcacatcacaatgtggtttcacatttattttccttctgatttttatctggaaatattgggctgttcaccataggagttaatgggttccaaaatgtctcttcacacagtctacaaaactagtgtttccaacctgatgaatcaaaagaatggtttaacccattgagctgaatccacacttaacaaagtagtttcacagatagcttcttgatagtttttatgtggagatattcggtttctcatcataggcatctatgggcttatatatgttccttcgcagattctatctaaagggtgtttccatcctgttgtatcaaaagaaaggtttaactctgttcaatgaatccacacatcacagaacacttcacagatagtttctttctagtttttatctgggaatattttgtttttcacaataggcctcaaggggctccaaaatgtcccttcacagattctgcaaaatgagtgtttcaaacctgaggattcaaagaaaaagtttaagtctgtgagataaatccacacatcaacaaaggagtttcactgatagcttttttctagtttttatctgaggatatctttttttttcaccataggccacaatgggctgtgatatgtccctagtgagattctacgaaaacaatgttttcatcctgctgaatcaaaagaaaggtttaccttggtgagataaattgaaacttcacaaagcagtttcaaagacagctcctttttagtttttatcttgggatattttgtttgccaccctaggcctcaaagggctccataatatcccatcgccaattccacaaaatgagtgtctcccaactactggatcaaaaaaaaagtttaaacctgtgagatgaattgcacatcacaaagcaatttcacagatagcttccttctggtttttatctggaaatattgggttgttcaacataggactcaatgggctccaaaaaggctcttcacagagtctacaatatgagtgattacaacctgatgaatcaaaagctatgtttaactctgtgatgtgaagtcatactttaaaatgcagtttcacagatagcttctttctagtttttatcaaggtatattcagtttttcacaataggcctctaagggatcccagatttcccttggtagattctaccaaaagagtgattccaacttcctgaatcaatataaatgtttaactctgtaagataaatctagacattgtaaataagttaaacaggtagcttctttctagtttttatctggagttattgagtttttcaccataggcctctatgggctcttaaatgtccctttgcagatgctaactaaagactttttcatacctgttgtgtcaaaagaaatgtttaactctgtgagatgaatccatacatcacaatgcagttacacatttagcttttttctactttttatctggggatattctgttttttaccataggcctctatgggctcttaaatgtccattcacagattccatctaaaaaatgtttcaaacacgctatattgacagaaatgtttaactctgttagatgaataaatacatcccaaacagtttcacaaagagcttccttctagtttttatcaggggatttttttttcattataagcctcaaaggtctctcaaatgccccttcccagattgtacaaaaaggtgtttcaaacctgctgaatcaaaagaaaggtttaactctatgagatgaatccactcaccacagagttcattcactgatcccttctttctagtttttatcttgaaatatttgtgtgtgtgtgtgtgtttttaccatagacaatagtgagctcacaaatctattttcatagattctagcaaaagagtgtttgcatcatgctgagtcaaaagaagggtttgagtctttgagatgaatccacacatcacaaagcagttttaaagatagcttctttctggtttttacctgggaatatttgatttttcaccatgtactttaatgggctcccaaatgtcactatgcagattataaaacaaaaacatttgcaacctgttgaatcaaaacaaagttttatctcactgagatgaatccacacataccaaagcagttagacagattacttctttttagtttttatctggggatattcagtttttcaccttaggcctctatgggctcccaaatgtctttccactgattctaccaaatgagtgtttccaagctactgaatcaaaagaaatgtttaactctgtgagatgaatccacacattgaaaagcagttttacagacggagtccttctagtttttatcttggaatatttggttattcaccagaggcccaaaaaccgctacaaaatatccattcatagattctaccaaaagagtgtttttaaaatgctgaatgaaaagtagggttgaactctgtgagatgaatccacacatcaaaaagcagttttacagacagagtccttctagtttttatcttggaatattcggttattcaccagaggcccaaaaaccgctacaaagtgtccattcgtagattctaccaaaagagtgtttttaaaatgccaaatgaaaagtaaggttgaactctgtgagatgaatccacacatcacaaagcagtttcacaagtagcttgtttttaattttgagatattcggtttttcaccgtagtccgtaaagtgctcccaaatgtctcttggaagattctaccaagaaagtatttccaacctgttgaatcaaaagataggtttaactcagtgagatgaattcacatatcacaaaacagtttcacagatagattccttcaagtttttatcggattatattgggttcttcaacttaggtctctatgggctcccaaatacctctctgcaggttctacaaaacgagtgtttccaagctgctgaatcaaaagaaatgtttaactctgtgagatgtatccacatatcacaaagaggtttcactgatagcttcttcctagtatttatattaagatatttaattttttaacataggcctctgtaggcttccatatgtcccttcacagattcttccaaaaaagtgtttcaaatctgctgtatcaaaagaaaggtataagtctgagatgaatccacatatcaaacagcagtttcactgataatttctttctagtttttatctgtggatattctgtttttcaccataggcctctaagggctcacaaacgtcattttgcggaatctccaaaaagagaatttccaatctgttgaatcaaaaaaggtttaactctgtgaggtgaatccacgtatgacaaagcagtttgactgatagcttcttcctagtttttatctggggatattttattttcatcataggcctcaaagtgctcccaaatgtaacttcacagattctacctgaagagggagttgcaggaagtcagggaccctgaactgagaactgaggcacccgctgaagccatggcagaagaacatgaattgtgaagatttcatggacatttattagtttcccaaattaatacttttataatttctcacacctgtctttactgcaatctctgaacataaattgtgaagatttcatggacatttctcacttccccaatcaatactcttgtgatttcctatgcctttctttactttaatctcttaatcccatcatgaccctgtgatgattctgttaactgcacaaattgtttaaacaatataaaatctgggcaccttgaaaaaagttcatagtaacaacgatgttcagggaccaagggagataaccattagttctggctgcctgagacctgggtggaacagagccatatttctcttctttcaaaagcaaataggagaaatatcactgaattctttttcttgacaaggaacagctctgagaaaaagaatgcattcctagggataggcctctgaaatgactgctccgggaaaatctgtcttttacggttgtaggtaagggatgaaataagcccagtctcccatagcaggcttattaagacgagaaaattcctgcctaataaattttagtcagaccagttgtctgttctcaaaccctgtctcctgacaagatgttattagtgacaatgtgtgcccaaaacttcattagcatttttaattttgccctagtgctgggtgatctcaccctgcctctatttgccttgtgatattttattaccttgtgaagcaagtgatctctgtgacccacaccctattcctatactccttccccttttgaaaatcactaataaaaatttgctggttttatggctcaggtggcatcatggaacctgccgacatgtgatgtctccccgggaaaatagaaaagaacccacaaagaattattggaggtcggatcccctaatatctggtgcaccaacgtggttttttccttttcccaagtgcatgtgggaacccgattcccttttgtaggtgcacagaaacgtcattggtttggtccacagaaatgcaggttcgactccctgacaactggtgagtagcctctgtatggtctgggttaactgtgggttacacggagtataaaaattatactcatctcttctatattaaactccagttaaaacagaaaagggttcgagtgcccatggaaaacatggtaaccatggaaaatatggtcactctattcagggtggtggaaaaatactgtccttggtttcctggaaaaggaactgtatatgtaaaagtaagggattgtgttggtgcaacattccaggaactggtctggacaggaaattatgttcccatcactgtttgggggtgattgggacttggtaagtgccatcctaatacctcctcaactttcctctcccgcacggccttcattatctgatcagcctctccctttgcctactcctcccccatttaatgatgctgagacttcaatatctaactctgctgactttggctgaatgctaacccctacttatcttacttcttttcatgaagagctggtacttgaagctcccgtggccatgactcacacagcccaggaccataggtatgctaattcttctctcctcaagcctccagcatcagataatggctccagcagcaaactacaatttacctataattctccaggccctcccccatccactacagcccctcaccctcctgtcattttggttcctcaaccagccactttgccatccactcaacctgcttgtctgtagccttcttcacacatggatgccagtcatcatcagtatacctctgcctcttttactccttcaatgtccctttctcacattctcaaactagtctgcatcagtatgtgggactcaatcttacctttttaaaagaatttaaggattcttgtactcagtatggtcctacttctcctaatgttaaaacagcattacaaactttgtgtggaggcaactttgcttcctttagactgggaccttttgacataagctcttctaaccccatctcagcctggcgggcagagaagggccatctccaggctcagctaaatcagactaatggcattctaattactcaggctcagctcacaggctctgatagtttctctgatacttatgcccaattaggctttgatgctcttaccagaaaacaagtaacaaaggtgtgtatgagagcttgcaatacattacgtgccccaggccaagctcctgtttcttttactactgttaaagaagttcaattacttttactacctaatatcattttaaacaaatgagataagacacgtggccctgggattggcttctgtggtgaaaaggctgcttattggattaatgtaatttctaaacaatggcccacccacaccatacacattcctggaaaaaagtttgagggcctagtagatactgaggctgaaattaatattccacataactcttatggtactccccatcagcatgtgatggaaaacatgttgttttttcctggactcggtctcagtgcaaaacatgaagggattactaaacccctcccaattactgtaaaataagacagtaatggtttaggttatcctttttagtggcagccactgccacgcctcctgatcctatccctttacaatggaaatctgacacacccgtttggattcagcagtggctgctttctaaagaaaaactggaggctttaactcactttgtttctaaacagttacaacctcgaaatgtggaaccttatctttccccctggaagtctcctgtgtttctagtaaaaaagaaatcaggcaagtggcagatggtaactgatttaagggccattaaccctttaattaaacctatgggtgccatccaagatggcatgcctgcccctgctttaatacctaaaaattagcctctcatagttattgatcttaaagattgtttttttcatatttctttacataaatcagattgtgaaaaatttgcttttgctgtaccatctatcaataagtaggagcctgcagctcattatcaatggaaagtacttcctcagggaatgctaaatagccctacaatctgccacgtttatgttgggcaattgctttcaccagttcaagcccaatttccccaggcctatattcatcattatattgatgatatttaattactggccccactgataaagaattaatggactgttatcaaattttttgccacgatgttacagagcctggattacccatcactcaggataaaatttaacagaccacccgtgttcaatatttaggaatggtggtcgataaacaacgtattcaacctcaaaaagttcacattaggagagattctttgaaaactttaaatgacttccaaaaacttttgggtgacattaattatttaagacctactttaggcattctgacctatgcgttgtctaacttgttttctgtgctttggggagattccaatctcggcagtcccagaactttgacccctgaggcttcactagaactggaattcatagaggaaagaatccagatggcccagttatctagaatacatccgtttcaaccttttcagcttctggttttcgcttcattacattcccctatgggactaatcgttcaacataatgatttagtggagtgatgttttcttcctcactatgtgtcaaaaactttgattatctggaacaactggccatcttaattggacaagctcagtgcaaaatatttaaaatttccagattttttccaaatttgactgtagttcttttaaatcaccttgaagttcagccccctttcaacattacctactgtgtcaaattcacttgactgattttattggtgttactaacaatcattatccaaagaacaaattgtttaattttataaaaatgactccttgggtggtccctcgattaaccaaagatcagcccatttgtgaaaccgttacagtgttctctgatagttcttgtaatggcaatgatggttgtgtaggtcgtacagataagcttatttttacctctatatctctgctaaaaaggtagagttgattgctgtaattactgccttacaggatttccccaaacctttaaatattgtctctattctacttaatgtgggaaagaggatatgcttgtgttttgccaggagatcaccaaaaaaaaccacagagaaaagacgtccacgtcaccaaacgccctcagacgtggtgagatctgtgccaactcctcagaagttggcacaccaaatcaaaatgggtctgactcaaaccttcctgattgcaacggagacccatctaactaatcccacttcttctgattacctttctttttctccttaaaaatccaaaaatctcaccatttatattagcaaaaaaatgacatccctttgttcttctcttcctccttcaccactaaatctcgcttacactaggttttatttaattattctcctccttatactttctctctcaccagtttcctttcacactgatttacctactacacaaaattattcttattgggcttatgtgccttttcctccacttattcgacctctcacctggaatgatgctcctgcagtaatctgcactaacgatagtgtgtggctgcctggagctgcagaagaacattgccttgctcaaccaggagaagaaggcacagcatttaatgttaccattcattataaatacccacctctgtgcctcggacatgcacctggttgtatccatctagaaattcaagtgtgggttgcttgtcttctggagaaatcagctacagaggaactggacatttggtctctggcctctccctttatcctttaaaacaaatgaaagggggagtaacgggagataccccatactttcaatataaacttgcaggaaaaccatgttctaaaaattttgaaggcccacctacaaccttaatttgggaagattgtgttaactcacatgcagtaatattaaaaaagactcgtatggtttagtaatagactgggcacaaaagggctatttaaaaaaaattgcttctctggcagaaaggaatacctgaagggtacttattttatttcttattgggagaactagaatcatcattctactttgcataggaggttcaactcattctttcccttaaaatgggaagataaaggcattaccccccgaggccttgtatgatactccccattctgagcccagaacacccagaactttggaaatttgctattgacatgtctgtactgtgagtaggggaaggggaaactattctgtctgttgtccccactactgtccccctctctcagcatcaacatagatccagacattctactttacttacctccatcctgatggttcccatatacagttttgttaagcttccttacatgctgttagtgggaaatatcaaaatttgaacgaacagtcagagtacccaatgcattaattgtcatttataaacttgtattaacttccattttgaccccaggaaaagtgtaacgtttgttcgagcttgagaaggaatgtggattcaggtaactttgcccagaccttgagaatactccctgtcaatacacttaattaatgaagtgatacagtgaattctaaaaagatctaagagatttgttttcactttaatcgctgtgatcatgggcctataccccactgctggaatggcactacatcaatctactcaaacagctccttttgttaatgattggcaagccaattccactcaaatgtggaattctcaacaaggcattgaagaaaaattcgctaatcaaatcaatgacttaagacagtgtgttctgtcccattgatctatatctctgttttggtaccagtaccatgctgtttgggttactgtagccttgtagtatagtttgaagtcaggtagagtgttgtctccagctttgttcttttggcttaggattgacttggtgttgcaggctcttttttggttccatatgaactttaaagtagctttttccaatactgtgaagaaagtcattggtagcttgatggggatggcattgaatctataaattaccttgggcagtatggccattttcacgatattgactcttcctacccatgagcatggaatgttcttccatttgtttgtatcctcttttatttcattgagcagtggtttgtagttctccttgaagaggtccttcacatcccttgtaagttggattcctaggtattttattctccttgaagcaattgtgaatgggagttcactcataatttggctctctgtttgttattggtatagcgccgcatatctacaactatcagatctttgacaaacctgacaaaaacaagaaatggggaaaggattccctatttagtaaatggttctgggaaaactggctagccatatgtagaaagctgaaactggatcccttccttacaccttatacaaaaattaattcaagatggagtaaaggcttaaaagttagaactaaaaccataaaaaccctagaagaaaacctaggcgataccattcaggacataggcatgggcaaggacttcatgtctaaaacaccaaaagcaatggcaacaaaagacaaaattgagaaatgggatctaattaaactaaagagcttctgcacagcaaaagaaactaccatcagagtgaacaggcaacctacaaaatgggagaaaattttcacaacctactcatctgacaaatggctaatatccagaatctacaaagaactccaacaaatttacaagtaaaaagcaaacaaccccatcaaaaattgggcaaaggatatgaacagacacttctcaaaggaagacatttatgcagccaaaagacacatgaaaaaatgttcatcatcactggccatcagagaaatgcaaatcaaaaccacaatgagataccatcttacaccagttagaatggcaatcattaaaaagtcaggaaacaacaggtgctggagaggatgtgggaaataggaacacttttacattgttggtgggactgtaaactagttcaaccattgtggaagtcagtgtggcaattcctcagggatctagaactagaaataccatttgacccagccatcccattactgggtatatacccaaaggactataaatcatgctgctataaagacacacgcacacatatgtttattgtggcactattcacaatagcaaagacttggaaccaacccaaatgtccaacaatgataggctggcttaagaaaatggggcatatatacaccatggaatactatgcagccataaaaaatgatgagttcatgtcccttgtagggacatggatgaaattggaaattgtcattctcagtaaactatcgcaagaacaaaaaaccaaacaccacatgttctcactcatagatgggaattgaacaatgagaacacttggacacaggaaggggaacatcacactccaggtacagttgtggggttgggggatgggggagggatagcattaggagatatacctaatgctaaatgatgagttaatgggtgcagcacaccaacatggcacatgtatacatatgtaactaacctgtacattgtgcacatgtaccctaaaacttaaggtataataataataataataaaaagaaaaaaaagacaatgtgttatttggcttggagatcgggtaatgagtctcgaccattgcatgcaaattcagtgtgactggaatacttcagatttctgtataaccgtgtactcctataaagagactgatcattcatgggaaatggtcaaaggacaccttctgggtagggaaggtaatttatcattggacataactgaattaaaaacaaatttttgaagcctctgaatctcacttatccattatgcctagagctgaggcattagatcatgtggtagaaaacctttatggattaaaccccacgacttggattaggtctattgtgggctccactgaagtaaattttggaattatgtttctctgtttatttgcttgtctttagtgtgccagaccagtcaaagaatccagtgtcaaaatggagagaatgagcaagtgttcatcaacatggcacatttatataaaaagagaaggagaaatgttgcaggaagtcagggaccctgaatggagggactggctgaagccgtggtagaagaacataaattgtgatgattttgtggacatgtattagttccccaaattaatacttttataatttcttacatctatctttactgcaatctctgaacataaattgtgaagatttcatggacatttatcacttcccaaaccatacttgtgtgatttcctatgcctctgttaaatctcttaatcccatcatcttcataagctgaggatgaatgttgcctcaggaccctgtgatgattgtgttaactgcacaaattgttaaaacattatgcaagctgggcaacttgaaaaaagcacaagataagagagatgttcagggaactagggagataaccattatgtctggctgtctgagagctgggcagaacagaaccatatttctcttttttcaaaagtaaataggagaaatatggctgaattctttttctcagcaaggagcagccctgagaaagagaatgcattcctaggtgtaggcctttgaaatggccactctgggaatgtctgtcttttatggatgtagacaagggatgaaataagccctggtttcccgcagtgctctgaggcttattaggatgaagaaatacccacctaataatattggtcagaccagttgtctgttctcaaaccgtgtctcctgataagatgttatgaacaacaatgtgtggccaaaacttcattagcaattttaatatcaccccagtcctgtgatcttgccctgcctgcatttgccttgtgatattttattaccttgtgaagcacgtgatctctgtgacccacatcttattcgtacataccctcccattttgaaaatcattaataaaaacttgctgggtttatggctcagggggcatcacagaacgtgccaacattgtgatgtctcccccagacactcaactttaaaaatttctctctttttactctttccctttatttcttcgatgggttgacatttaggggaaatagaaaaggactcacgttgaaatatcaggagctgattttcccctgatagagagtttcaaacccactatatcaaaatcaaaatttaattctgtaagatgaatacacacatcataaagcagtttcaaagacagcttttttctagtttttatctggggatatttggtttttcactataggcctcaaaaagctcccaaatatttcctcatacattctaaaaaaagagtgtttccaacatgctgaataaaaagaaatgttcaacattgtgagatgaaaccacatatcaaaaagcagtttaacaaagagtttattcctagttgttatctgtggacatttgatttctcaccaaaggactcaaaaggctttcaaatgtcccttcgcagactctacaaaagtactgtttgcaacctgctgaattaaaatgaagatttacctctcttggatgagtccatacatcacaaagaagtttctatgggttcttaaatgtctctttgcagattctacctaaagagtgtttcaaatctgttttaatgaaagaacaatttaactctgtgagataaatccacacattacaaagctgttttacagatagcttttttctagtttttatctggggatatttggtttttcaccataggccaccatgggctcccaaatgtcccttcatggattctaacaaaagagtgtttacaacctgttaaatgaaaagaaaggtttcaaactgtgagatgaatccacacatcacaaggcagtttcacagatagcagttttctagtgtttatctgggaatattcggtttttcaccacaggcctccatggattctcaaaagtttcttcacagattgtacaaaaagagtgtatgcaacttgctgattcaatagacaggtttatctctgtgaaatgaatccacagatcacagggctgtttcacagatcacttctttcttgtatgaatctgtgaacatttcgtttttctctgtaggtctcaaaaagctccatttttctctttgcagatcctgtgaaaacagtgtttcaaacatgatgtatcaaaagaaacgttgacctctgtgagaagaatccacacatcacaaagaagtacacagatagctacttcctagtttttatatgaggattttttttttaaccatacacctcaaagggcttcaaaatgccccatgtagattctacacaactagtgtttccagcctcctgaattaaaggaaaggtttatctctgtgagatgaatccacacatcaaaaaagcagtttcacaaacagcttctttctggtttgtgtctgggggtattcggtttttcactgcttcctgaaagggtttccaaatgtacctttgcagattccataaaaagagtgtttttaatctgctgaatcaaaagaaagatttaactttgtgatttcaatccagatatcacaaagcagtttcacagatagcttctttcagtttttatctggggatatttggtcttttaccataggcctctaaggactctgaaatgtcccttgaaagattctaccataagagtttttccaatttaccgagtcaaaagtcatgtttaactctgtgaaacgaatccacacatcacaaggcagtttcacagatagcttctgtcttgtttttgtctggaaatattcggtttttcaccaaaaaaatcatgggcttcaaaaagtccctttgcatatcctacgaaaagaggatttcacacctgctgaatcaaaacaaacgtttaattctgtgaggtgaatccacacatgacatgcagtttcagagacactttctttctagtttttatctgggcatattctgtttttcaccgtaggcctctacggtctcccaaatatcccttcgcttattctaactgaagagtatttcaaacttgctgaatcaaaagaaaggtttaactctgagtggtgaatccacacataacaaagcagttccacaggtagcttccttctggttttcaactggggatattgtttttttcaccatagcctcaatggacttcaaaatgtcccttctcaggttctacaaaacaagtatttccaaccagctgagtcataggacaggcttatctctgtgagacgaatccacacatcacaaagcagtttcacaggtagctactttgtagttttatctgtggatattctgtttttcaccatagggctcaaataccttccaaacctcccttctcagattctgccaaaaagtgtttccaacccacttaatcaaaagaaagatttaactctgtagatgaatccaaacatcgcagagaagtttcacaggtagcttctttctagtttatatatgggaatattcagtttttcaccataggtctcaatgggctcccacatgtccctttcccgattttaccaaaagagtgtttccaaactgctgaatcaatagaaaaatttaaatctgtgagtagattccatacatcacaaagtagtttcactaaaaccttctttctagtttttatctttcaatattcaatttttcacagtgtgccacaatgggctggcaatgtcccttcacagattctagcaaaagaatgtttgcaaactgctgaatcaaaagaaaggtttaagcctttgggctgaatccacacttaacaaagcagtttcacagagagcttctttgtactttttatgtggggatatccagtttttcaccataggcatctgtgggcttataaacgctcattcacaggttctatctaaaaagtatttctatcctgctgtatcaaaagaaagatttaactctgtgcaatgaatctacacatcacaaagcagtttcactgatagcttctttctaatttttatttggagatattcagctttccactataggcttaaaagggctcccaaatgtccctttgcagattctaccaaaagagtgtttccaacctgctgaatcaaaagataggtttaactcagtgaggtgaatccatacatcacaaagccgttacatatttagcttatttctactttttatctggagatattctgtttttcaccatagacctctatgggctcttaaatgtcccttcacagatactatttaaaaaatgtttgaaccatgctatattgacagaaatatttaactctgttagatgaataaacacatctcaagcagtttcacagtacttactttgtagtttttatctggggatttttgattcttcattacatgcttcaaagttctctaaaatgcccattcgcagattcttcaaaaaggtgtttacaatctgctgagtcaaaagaaaggtttaacactgtgagatgaatccacacataggaaagcagttacacagacagcttctttctactttttatctggggatattcagtttttcacctcaggcctctatgggctcccaaatgtctttccactgattctagcaaacaagtgtttccaagcgactgaatcaaaaggaatgtttaactctgtgaggtgaatccacatatcaaaaacagttttacagacagagtctttctagtttttatcttggaatattcggttactcaccagaggccagaaagcctctacaaaatgtcccttcatagattctaccaaaagagtgtttttataatgctgaatgaaaaggatggttgaactctgtgagatgaataaatacaagacaaagcagtttcacagatagcttgtttctagttttaatttgcagatatttggtttttcactgtaggctgtaaagggctcccaaatgtccctttgcagattctaccaagacagtgttttcaatctgctgaatcaaaagataggtttaacacagtgagatgaatccacacatcacaaagcagtatcacagatagattccttcgagtttttagctggggatattgtgtttttcaccttaggtctctatgggctcccaaatgtcactctgctggttccacaaaacaagtgtttccaagctactgaatcaaaagaaatgtttaaatctgtgagttgaatccacacatcacaaagaggtttcactgatagcttcttcctagtatttatatgaagatattcagttttttaacataggcctctatgggcttccatatgtcccttcacagattcttccaaagaagtgtttcaaatctgctgaatcaaaagaacggtttacctctgtgagatgaatccccatatcacaaagcagtctcactgataccttctttctcgtttttatctgtggatattctgtttttcaccataggcttctaagggctcacaaacgtccttttgcagaatcctcaaaaagaaggtttccaatctgctgaatcaaaagaaaggtttaaatctgtgaggtgcatccacacagtagaaagcagtttcacagatagcttcttacttgtttttatctggagttattttatttttcaccataggcctcaaagtgctcccaaatgtacctttgtagaatctacctaaagagagtttccaacctgttgtatcaaaatgaaattttaactctgtaagatgaatgcacacatcacaaagcagcttcaaagacagattttttcttgtttttatctgggaatattctgtttttcaccataggactcaaaaactcccaaatgtttcctcatacattctaaccaaagagtgtttccaacctgctgagtaacaagaaaggttcaacaatgtgagatgaaaccacatatcaaaaagcagtttaacagatagttttttcctagttgttatctgtggacacttagtttctcaccaaaggactcaaagggctttcagtgtccctttgcagactatgcaaaaatactgactgcaacctggtgaattaaaagaaagattttcttctcttggattaatccacacattacaaagaagtttcacagatagcctctttctagttttgatcttgtcatagttggtttgtcactatggactatggtgggcttgcaaatatcccttcaaagattctagaaaaagagtgtttttaaaccagtgaatcaaaaacaagtttaaccctttgagatgaatccacatatcactaagcagtttcacagagagcttctttgtagtttttatctgaggatattctgtttttcaccacaggcctctatgggttcccaaacctcccatcacagattctaccaaaagactgcttgcaatctgcttaataaaataaaaggtttaactctgtgagatgaatccacacatcataaaacagtttgacagacagcttctttctagattttatctgggaatattctgtttttcaccgtaggcctctatgtgtccccaaatgtcccttcacagattctacctaaagagtgtttcaaacatggtttatcaaaagaaaaattttactgtgtgaggtaaatccacacatcacaaagctgttttacagatagcttttttctagtttttatctcgggatattttgtttttcaccataagcccccaagggctctcaaatgtccctttgcagattctaacaaaagagtgtttccaagctgtgaaatgaaaagaaagatttgacactttgagaggaatccacacatcacaaagcattttcacagatagcttttttctagtgtttaaagtttcaccaataacttttttctagtgtatatctggggataatcagtttttcaccataggtctccatggactcccaaaagtttcttcactgattctacagaaagaatgtatgcagcttgctgattcaatagatgggtttatctctgtgaaatgaatccacagatcacaggactgtttcacagatagcttctttctagtttttatctgtgaacattgggtttttcatcataggcctcaaaaagctcccaaatttctctctgtggattctacaaatcagtgtttccatcatggtgtatcaaaagaaacgtttatctctgagatgaatccacacatcacaaagatgttcacagatagcttcttcctagttttatctgggaatatatatatatatatatatatatatatatatatatatatattttaacataagcctcaaagggcttcaaaatgctgcaagaagatgctacaaaatgagtgtttccaacctgctgaatcaaaggaaacgtttatctctgtgagatgaatccacacatcaaaaaagcagtttcacaaatagcttctttctggtttttatctggggatattcagtttttcactatattcctgaaagggttcccaaatgtaccctcaaagattctataaaaagagtgtttttaacctgcttaatcaaaagaaagatttaactttgtgatttgaatccagacatcagaaagcagtttcacagatagcttctgtctatcttttatctgaggatacttggttttttatcataggtctctaagggctccaaaatgtacctggaaaggttctgccataggagtgtttccaatttactgaatcaagagaaatgtttaattctgtgaaatgaatccacacatcacagggcagtttgacaggttgcttctttctactttttatcaagaaatatttgctttttcaccataaacctcaatgggcttcgaaatgtcccttcctaccaaaagagggtttcacacctgctgaatcaaaacagacgtttatttctgtgaggtgaatccacacatcacacagcagttacacagacagcttctctctagtttttatctgaggatactctgttttttagcataggcctctaaggtctcccaaatgtcccttcccatattctacttaaagagtatttcaaatttgctggatcaaaagaaaggtttaactctgagtggtgaatccacacattaaaaagcagtttcacaagtagcttccttctagtttgtaactggggatattgtttttttcacaatagacctcagtgggcttccaaatgtcccttctcaggttcttcaaaatgagtgtttcccacctgctgaatcaaaggaaaggcttatctctgtgacatgaatccacgcatcacaaagcagattcactgatagcttctttatagtttttattttgaaatatatatatatttttaccatcgactacagtgggctcacatatctctttttgcagattctagcaaaagagtgtttccatcatgctgagtcaaaagaaaggtttaagtttttgagatgaatccgcacatcacaaagcagtttcaaagactgcttctttctggtttttatctggggatatttggtttttccctatcagcctcaaaaaactcccaaatatttcctgatacattctaaccaaagagtgtttccaacctgctgagtaaaaagaaaggttcaacactgtgagatgaaaccacatatcaaaaagcagtttaacagatagtttcttcatagttgttatctgtggacaccaaaggactcaaaaggctttcaaatgtcccttcacaaactctgcaaaagtactgattgcaacctgctgaattaaaagaaaggtttacctctctggaatgaatccacatatcacaactttcacagatagcctctttctagttttgatcttgggatattcggttagtcactatggactacagtgggatcaaaaatgtccctttacagattctagaaaaagagtgcttctaacccagtgaatcaaaaacaagtttaaccctttgagatgaatccacatatcactaagctgtttcacagagagcttctttctagtttttatctggggatattctgtttttcaccataggcctttggggttcccaaacttcccttcacagattctaccaaaagagtgtttccaacatgcttaacaaaagaaaaggtttaactctgtgagatgaattgacacatcacaaaagagtttgacagatagcttctttctagattttatctggggacattctgtttttcactgtagacctctatgtgttcccaaatgtcccttcacagattctacctaaagagtgtttcaaacatggtttatcaaaagaaaaacttaactctgtgagataaatccacacatcacaaagctgttttacagatagcttttttccagtttttatctcgggatattttgtttttcaccaaaggcccccaagggctctcaaatgtccctttgcagattctaacaaaagagtgtttccaagctgttaaatgaaaagaaagatttgacactttgagatgaatccacacatcacaaagcagtttcacagatagcttttttcttgtgtttatctggagatattctgtttttcactataggcctccatggactcccaaaagtttcttcacagattctacaaaagagtgtatgcaacttgctgattcaatacacaggttaatctctgtgagatgaatccacagatcacagggctgtttcacagaaagattctttctagtttttatctgtgaacattgggtttttcaccatagacctcaaaaagctcccaaatttctctttgcagatactacgaaaacagtgtttcaaacacactgtatcaaaagaaacgttgacctctgttagatgaatccacacatcacaaagaagttcacagatagcttcttcctagtttttatatggggatattgtgggcttttttgtcatagacctcaaagggcttcaaaatgccccatgtagattctacaacacgtgtgttttcaacctgctgaatcaaaggaaaattttatctctgtgagatgaatccacatatcacaaagaagttcacagatagcttcttccattttttatggtgatattattattattatttttttaccataggccacaacagactccaaaatgccccatgcagattatacaaaacgagtgttttcaacctgctgaatcaaaggaaagttttatctctgtgagatgaatccacacatccaaaaagcagtttcccaaatagcttctttctgatttgtatctgggggtattttgtttttcacaacatttctgaaattgttctcaaatgtaccttcacagattctataaaatgagtgcttgcaaactgctgaatcaaaagaaaggtttacctttctgatttaaatccagatatcattaagcagtttcacagatagcttctttctagtttttatacttttttttttttttttttttttttaccataggcctctaagggctccaaaatattccttgaaagattctaccataacagtgtttccaattttcagaatccagagaaatttttaattctgtgaaacgaatccacacatcacaaggcagtttcacaggcagcttctttctagtttttttctagaaatatttggtttttcaccataaacctcaatgggcttccaaatgtcccttcgcatatcctaccgaaaaagggtttcacatccactgaatcaaaacaaacatttaattctgtgaggtgaatccacacattacacaacagtttcacagacaccttctttctagtttttatctggggatattctctttttcaacataggcctctatggtctcccaaatgtccctttgcatattctaactgaagagtattgcaaatttgctggatcaaaagaaaggtttaactctgagtggtgaatcctaacatcacaaagtagtttcacaggtagcttccttctagtttgtaactggggatattgtctttttcaccatatgtctcaatgggcttcatatgtctcttctcaggtactgcaaaatgagtttttgcaacctggtgaatcaaaggaaaagcttatctctgtgagatgaatgcacacatcaaaaagcagtttcacagatagctactttgtagtttttatctgtgaatattctgtttttcaccatagacctcaaaaagcttccaaatctcccttcgcagattctgccaaaaaagtgtttccaacgtgatgaatcaaaagaaaggcttaactctgtgaaatgaatccacacattgcagagcagtttcacagatagcttccttctagtttttatctggaaatattcggtttttcaccataggtctcaatgggcttgaacatgtccctttcccaattttgccaaaagagattttccaaactgctgaatcaatagaaaagtttaactctgtgagtaggatccacacatcccaaagtagtttcactaaaagcttcttgctagattttatcttcgaatattcaattttccacagtgtgctacaatgggcttgtaaatgcccctttgcagattctagcaaaatagttttcgcaacctgctgaatcaaaagagagctttaaacctttgagctgaataaacacttaacaaagcagtttcacagatagcttcttgatagtttttacgtggggttattcggtttttcaccataggactctatgggcttataaatgttccttcacagattctatgtaaagagtgtttccatcctgctgtatccaaagaaaggcttagctctgtgcaatgaatccacacagcacagagcacttcacagatagtgtctttctagtttgtatctggggatactttgtttttcacagtaggcttcaatgggctccaaaatatcccttcacagattctgccaaatgagtgtttcaaacctgcagaatcaaagaacggtttaagtctgtgaggtaaacgcacacttcaaaagaacagtttcactgatagcttctttctagttttcatgtagggacatttggtttttcaccataagcctaaaagggctcccatgtgtccctttgtagattctacaaaaagaatgtttccatccttttgaatcaacagagatttaactctgagataaaggtaaaaatcacaatgaagtttcagaaatagcttctttctggtttttatctggggatatctgttttttcaccataggcctcaatgggctatgataggtctgtgtgcagattctaccaaaagagggtttacaacgtgctgaatcaaaagaaaggtttaactctgtgagataaatccaaacatcacaaagcagtttcactggtagctccttttcaggttttatcttgggatgtttggttttcaaccataggctttaatgggctctgaaatatcccatcactgattctacaaaattagtgtctccaacctacttaatcaaaaacaaaaattttaaatttgtgagacgattcacacatcacaaagcagtttcactgatagctttcttctgctttttatctggaaatattgggttgttcaacataggacttaatgggctccaaaatgtctcttcacaaagtctacaaaaagagtgtttccaacctgatgaatcaaaagaaacgtttaactctgtggcatgaatccacactttacaatgcagtttcacagatagcttctttccagtttttatcaaggaatattcagtttgtcacaataggcctctaagggatcccagaattcccttggaagattctatcaaaagagtgattccaacttcctgaatcaaaataaatgtttatctctgtgagatgaatccagacattacaaataagctaaacaggtaccttcttcctagtttttatctgaagttattcagtttttcacaataggcctctaagggatcccaaatgtcccttggcagattctaccaaagggtgattccaacttgctgggtcaatgtaaatgtttatctctgttagataaatacagacattacaaataagttaaacaaatagcttctttcttgtttttatctggagttattgagtttttcaccataggcctctgtgggctcttaaatgtcccttcgcagacactaattaagactgtttcatacctgttgtgtcaaaagaaaggtttaactctgagaggaatccatacctcacaatgtagttacattttagcttttatctactttttgtctggggatattctatttttcaccataggcctctatggactcttaaataccccttcacagactctatctaaaaaatgtttcaaacatgttatatagacagaaaaattaaactctgttagatgaataaacacatcccaaacagtttcacaaagagcttccttctagtttttatctggggatttttggatttttttttgttttcttattatactttaagttttagcgtacatgtgcacaacaaacgtgccggtttgtaacatatgtatacatgtgccatattggtgtgctgcacccattaactcatcatttagcattaggtatatctcctaatgctatccctcccccatcctcccaccccacaacaggccctggtgtgtgatattcccctgcctgtgtccatgtgctctcattgttcaattcccacctatgagtgagaatatgcggtgtttgtttttttgtccttgtgatagtttgctgagaatgatgtttccagcttcatccgtgtccctacaaaggacaagaactcataattttttatggctgcatagtattccatggtgtatatgggccacattttcttaatccagtctatcattgttggacatttgggttggctccaagtctttgctattgtgaatagtgccacaataaacatacgtgtgcacgtgtctttatagcaacatgatttataatcctttgggtatatatccagtaaggagatagctgggtcaaatggcatttctagttctagatccctgaggaattaccacactgacttccacaatggttgaactagtttacagtcccaccaacagtgtaaaagtgtttctatttctccacatcctctccagcacctgttgtttcctgactttttaatgatcaccattctaactggtgtgagatgttatctcattccttctcctgcctgattgctctggccagaacttccaacactatgttgaataggagtggtgagagagggcttccctgtcctgttcctgctttcaagggaatgcttccagtttttgtccattcagtatgatattagctgtgggtttgtcatagatattattatttgagatacgtcccatcaatacctaatttactgagagtttttagcatgaagtgttgttgaattttgtcaaaggccttttctgcatctattgagataatcatgtggtttttgtctttggttcttgtttatatgctggattatgtttattgattttcgtatgttgaaccagccttgcatcccagggatgaagcccacttgattatggtggataagctttttgattgctgctggattccgtttgccagtattttattaaggatttttgcatcgatgctcatcaaggattttggtctaaaattctcttttttggttgcgtctctgcccggctttggtatcaggatgatgctggcctcataaaatgagttaggcaggattccctctttttctattgattcgaatagtttcagaaggaatggtagcagctcctccttgtacctctggtagaattcggctgtgaatccatctggtcctggactttttttggttggtaaactgttagttattgcctcaatttgagatcctgttattggtctattcagagattcaaattcttcctggtttagttttgggaggatgtatgtgacaaggaatttatccatttcttctagattttctaatttatttgcatagaagtgtttatagtattctctgatggtagtttgtatttctatgggattggtggtattatcccctttgtcttttttattgcatctatttaattcttctctcttttcttctttattagtcttgctggccgtctatcaattttgttgatcttttcagaaaaccagctactggattcattgattttttgaagggttttttgtgtctctattccttcagttctgctccgatcttagtaatttcttgccttctgttagcttttgaatgtgtctgctcttgcttttctagttcttttaattgtgatgttagggtgtcaattttggatctttcctgctttctcttgtgggtatttagtgctgtaaatttccctctacacactgctttgaatgtgtcccagagattctggtatgttctgtctttgttctcgttggtttcaaagaacatctttatttctgcgttcttttcgttatgtacccagtagtcattcaggagcaggttgttcagtttccatgcagttgagtggttttgagtgagattcttaatcctgagttctagtttgattgcactggggtctgagggacagtatgttataatttctgttttttgcatttgctgaggagtgctttacttccaactatgtggtcaattttggaataactgtgatgtggtgctgaaaatagtgtatattctgttgatttggggtggagaattctgtagatgtccatcaagtccacttggtgcagagctgagttcaattcttggatttcctttttaactttctgtttcattgaactgtctaatgttgacagtggggtgttaaattctcccattagtaatgtgtgggagtctaaatatctttgtagatcactcaggacttgctttatgaatctgggtgctcctgtattgggtgcatatatatttagaatagttagctcttcttgttgaattgatccctttaccattaagtaatggccttctttgtctcttttgatctttgttggtttaaagtctgttttatccaagactaggattgcaacccctgcctttttttgttttccatttgcttggtagatcttcctccatccttttattttgagcctatgtgtgtctctgcacattagatcggtttcctgtatacaacacactgatgggtcttgactctattcaatttgccagtctgtgtcttttaattggagcatttagcccatttacatttaaggttaatgttgttaagtgtgaatttgattctgtcgttatgatgttagctggttattttgcttgttagttgatgcagtttctttctagcctcgatggtctttacaatttggcatgtgtttgcagtggctggtaccagttgttcctttccatgtttagtgcttccttcaggagctcttttagggcagacctggtggtgacaaaatctctcagcatttgcttgtgtgtaaaggattttatttctcattcacttatgaagcttagtttggctggatatgaaattctgggttgaaaattcttttctttaagaatgttgaatattggcccccactttcttctggcctgtagagtttctgccacgaggtcagctgttagtctaaagggcttccctttgtgggtagcccgacctttctctctggctgcccttaacatttttgccttcatttcaactttggtgaatctgacaattatgtgtcttggaattgctaatgtcgaggagtatctttgtggtgttctatgtatttcctgaatttgaatgttggcctgccttgctagattggggaagttctcctggataatatcctgcagagtgttttccaacctagttctactctccccattacttttaggtacaccaatcagacgtagatttggtcttttcacatagtcccttatttcttggaggctttgttcacttctttttattcttttttctctaaacttctcttcttgcttcatttcattcatttgatcttccaccactgataccgtttcttctagtagatcgattcagctactgaggcttatgcattcgtcacgtggttcttgtgccatggttttcagctccatgaggtcctttaaggacttctctgcattgattattctagttagccattcgtctaatttttttcaatgtttttaacttctttgccatgggtgcacacttcctcctttagctcagagtagtttgattgtctgaaaccttcttctctcaactcgtcacagtcattctccatcaagctttgttccattgctgttgagtagctgtgctcctttggaggaggagaggcactctgatttttagagtttccagtttttctgctgtttttccccaatctttgtagttttatctacttttggtctttgatgatggtgacttacagatcacctttggtgtggatgtcctttctgtttgttagttttccttctgacagtcaggaccctcagctgctggtctgttggagtttgctggaggtccactccaaaccctgtttgcctgggtataagcagcagaagctgcagaacagcagatattggtgaacagcaaatgttgctgtcttatagttcctctggaagttttgtctcagagtagtacctggctgtgtgaggtgtcagtcttcccttactttggggtgtctcccagttaggttacttgggggtcagggaccaacttgtggaggcagtctgcccgttctcagttctcaagctgcatgctgggagaacgactattctcttcaaagctgtcagacaggaatgtttaagtctgcagaggtttctgctgccttttgttcagctatgcattgccccgagaggtggagtctacagaggcaggcaagcctctttttgctgcagtcggctccacccagtttgagcttcctggccactttgtttacctactccagtttcggcaatggtgggcgcctctctcccagcctcactgctgccttgcagtttgatctcagactgctgtgctatcaatgagagaggctccatgggtgtaggaccctcctagccaggcgctggatataatgtcggtgtgccatttgttaagaccattggaaaagtgcagtattaggctgggagtgacccgattttccaggtgccatctttcacctctttctttgattcagaaagggaattctctgagcccttgcatttcccaggtgaggcgatgcctcacccagctttggctcacactcggtgcagtgcaccggctgtcctgcacccactgtctggcactacccagtgagatgaacctggtacctcagttggaaatgcagaaatcacccgtcttttgtgtcactcacactgggagttgtaaactagagctgttcatattctgtcatcttggctccaacccctttggtttttcgctataagcttcaaatatctctcaaaagtcccttcacagattctacaaaaaggtgtttccaacctgctgaatcaaaagaaagtttaactctgtgagataaatccacaaatcacaaagcagattcactgatagcttctttctaatttttatcttgaatttttttttctttttaccatagactacaatgggttcatgaatctccttttgcagattgttgcaaaacagcatttccaacatgttgagtcaaaagaaaggtttaaatcattgaaatgaatccacacatcacaaagcagtttcaaagatagcttctttgttgttttcatctgaagatatttgatttttcactaaaggctttaataggcccccaaatgtcactatgtagattataaaacataagtatgtgcaacctgctgaatcaaaagaaaggtttaactctgtgagatgaatccacacataacaaagcagttacacagatagtgtctttgtagtttttatctggggatattcagtttttcaccttaggcctctatgggctcccagatgtctttccaccaattctaccaaatgagtgtttccaagttactgaatcaaaagaaatttttaaccctgtcagattaatccccacatcaaaaggcaattttacacacagagtctttctagtttttatcttggaatatttggctattcaacagaggccaaaaaactgctacaagatatcccttcatagattctaccaaaagattgtctttaaaatgctgaaagaaaaacaaggttgaactctgtaagatgaatccacacatcacaaagcagtttcaccaatagcttccttcctgtttttatttggagatattttgtttttcactgtaggccttaaagggctcccaaatgtccgtttgcagattgtatcaaaagagtgtttccaacctcccgaatcaaaagatacatttaactcagtgagataaatccacacatcacaaagcagtttcacagacagattccttcaagtttttatcttgggataatgtgtttttcaccttaggtttctatgggatcccaaatgtctctcttcagtttccacaaaacgagtgtttccaagctgctaaatcaaaactaaggtttaactctgtgagatgtatccacatatcacatagagatttcactgatagcttcttcctagtatttgtatgaagatatccggtttttgaacataagcctctgtgggcttccatgtctcccttcccagattcttccaaacgtgtttcaaatctgctgtatcaaaagaaatgttttactctgtgagatgaatccaatatcaaaaagcagtttcactgataccttctttctagtttttaactgtgggtattctgtttttcactgctggcttctaagggcccacaaacgtccttttgcagaatctccaaagacagggtttccaacctactgaattggaaaggtttaaccctgtgaaatgaatccacacattactaagcagtttcactgatagcttctttctaatttttcctggggttattttattttttgctataggcctcaaagtgctcctaaatgtaccttcccagattctacctaaagagagtgttgggggaagtcagggaccccgaatggagggaccagctgaaggtatgcagaaaaacataaattgtgaagatttcatgaacatttattagttccccaaattaacacttttataatttcttatgcttgtctttactgcaatctctgaataaaaattgtgaagattttatggacatttatcactttcccagtaaatggtcttgtgatatcctatgcctgtcttttctttaatctcttaatcctgtcaccttcataaactgaggataaatgttgcctgaagaccgtgtgatgattgtgttaactgcacaaattgtttaaacaatatgaaatctgggcaccttgattaaagaacagaataacagcgatgttcagggaacaaaggagataaccattaggtctggctgcctgagagccgggtggaacagagccatatttctcttctttaaaaaaaaataggagaaatatcactgaattctttttcttagcaaggaagagccctgagtgagagaatgcatcccttggggtaggcttctgaaatggcagctctgggaacatctatcttttttggttgtagataagggatgaaataagccccagtctcctgtagtgctcccaggcttattaggatgaggaaattcccgcctaataaattttggccagtccgtttttctgtcctcaaaccctgtctcctgataagatgttatgaatgacaatgcttgcctgaaacttcattagcactttaaattttgccccagtcctgtgatcttgccctgcctccatttgccttggatattttattaccttgtgaagcatgtgatctctgtaacccacaccctattcgtacactccctccccttttcaaaatcactaataaaaactctctggttttatggctcagggggcatcatggaacctgcttacatgtggtgtctcccttggacaactagctttaaaaatttctctctttgtactctttccctttatttctcagactggccaaacttagggaaaatagaaaagaacccatgaagaattgcctggggtagtttcccccaatatctggcatgccaaaacggttttttctttttcccaagtgcatgtggcaacccgattccctttggcaggtgtgcagaaacttcattggtttggtccacaaaaacccacgttcgactccctgacaactcatgagtagtctgtatatggtccgggttaactatgggtcacagggagtataaaaattatacttatctcttccatattaaactccagttaaaacagaaaagggtttaagaccctgtggaaaatatggtcactctattcagggcagtggtaaactactgtccttggcctcctaaaaatagaaccttagttgtagatctactaaaacagggaagggtctgagtaaccatggaaaatgtggtcactctattcagggcggtggaaaaatactgtccttggtttcctgaaaaaggaaccgtatatgtaaaagtatgggatcatgctggtgcaacattctgggaactggtcccaacagagaattatgttcccatcactgtttgggggtgattgggtcttggtaagtggcgtcctcatacctgggaatcctccctgtcaatacatttaattaatgaagtgttacagcgaattctgaaaagatctaagagatttgttttcactttaattgctgtgatcatgtgcctaattacagtcactgcactggccaccactgctggaatggtgttatataaatctattcaaatggctcattttgctaatgattgggaagcctattccacccaaatgtggaattctcaacaaatcattgatcaaaaattggctaatcaaattaatgatttaagacagtgttatttggcttggagatggggtagtgagtctcgaacattgcatgcaaatgcagtgtgactggaatacttcggatttctatatcacaccataatcctgtaaagagaatgatcattcatgggaaatggtcaaaggacaccttctgggtgatgaagataatttatcattggacataactaaattaaaaacaactttttgaggcctctgaatctcacttatccattgtgcctggagctgaggcattagaccaggtagtagaaaatctttatggactaacccacgacttggattaagtctactgggggctccactgtagtaaattttggaatcatgtttctctgtttaattggcttgtcttaatatgatagaccagtcaaagaatcatgcatcaaaatcgagagaatgaacaaaccttcatcgccatggcacatttatatcatcagaaagggagatatgttgtgggaagtcagggaccctgaatggagggaccagctgaagccatggcagaagaacataaattgtgaagatttcatggacctttattagttccccaaattaatacttttataatttcttacacctgtctttactgccatctctgaacataaattgtgaagatttcatggacatttatcactatgaatgtcgcctcaggaccctgcaatgattgcatgaactgcacaaattgtttaaacaatatggaatctgggaaccttgaaaaaagaacaggacaacagtgatgatcagggaacaagggagataatcattaggtctggtttcctgagagttgggcagaacagagccatatttatcttctttcaaaagcaaataagagaaatatcactgaattctttttctccacaaagaacagccctgagaaagagaatgtattcctaagggtagaactctgaaatggccactctgggaacatctgtcttttatggttgtagagaagggaagaaataagccccagtctcctgtagccctcccaggcttattaggaggaggaaattcccacctaataaattttggtcagaccggttgtctgctctgaaacactgtctcctcataagttgttatcaatgacaatgtgtgcctgaaaattcattagcaattataattttgccccagtcctgtgatctcaccctgcctccagttgccttgtgatattttattactttgtgaagcatgtgatctctgtgacccataccctattaatacacaccttccccttttgaaaatcactaataaaaacttcctggttttattgctcatgcggcatgacagaacctgcctagatgtgatgtctcccctggacacccagctttaaaagtttctctctttgtactctttccctttatttctcagaccagccaacatgtagggaaagtagaaaagaactcacattaaaatatcaggggctgaatttcccctgatagagagattcaaacatgctgtatcaaaataaaaatataactctgtaagattaacacacatatcacaaagcagtttcaaagacagtttattctagtttttatctggggatattctttttttcaccatagacctctatgggttccgaaacctcccttcacagattctaccaaaagagtgtttcaaacctgctgaataaaagaaaaggtttagctctgtgagatgaatccacacatcacaaaacagtttgacagataatttctttgtagattttatctggggatattctgtttttcaccataggcctgtatgggttccccaaagtcccttcacagattctacctaagagtgtttcaaacctgttttatcaaaataaaaatttaattgtgtgagataaatccacacatcacaaagctgttttacagatagaattttctagtttttatctggggatagttggattttcaccataggcctctatggactcccaaagtttctttgcagattctacaaaaaggctgtacgcaacttgctgattcaatagatgggtttatctctgtgagatgaaccaacagatcatggggctgtttcacagatagcttctttctagctggtatctgtgaacattcggttttttatcataggcctcaaaaagcttccaaatttctctttacagattatatgataccagtggtttccaacatgttgtatcaaaagaaacgtttacctctgtgagatgaatccacacatcataaagaagttcacagatagctttttcctagtttttatcaggggataatggtttttttttgtttttttgttttttttgttgttgttatttttttgtttttttttaacataggcctcaaagggcttcaaaatgccccatgaagattctacaaaactagtgtttccaacctactgaatcaaaggaatggtttatctctgtagatgaatccacactcaaaaaagcagtttcacaaatagcttctttctggtttgtatctgggggtattcagtttttcactacattcctgaaagggttcccaaatgtaccttcgcagattccataaaaagtgtctttgtaacctggtgaatcaaaagaaaggtttaagtttgtgatttgaattgagacatcacagagcagttgcacagatagcttctttctagtttttgtctggggatattttgtttttaccatacgagtctaagggctctgatacagccctttaaagattctaccataagagtttttcccatttactgaatcaaaagaaatgtttaactctgtgaaacaaatccacacatcacaaggcagcttcacaggtagcttctttctagtttttatatagaaatattaggtttttcaccttaaaccctaaagggctttgaaatgtcccttcgcagaacttaccaaaagacggtttcacacctgctgaatcaaaacaaatgtttaattctgcgaggtgaatccacacatcacacagcagtttcacagacaccctctttccatattatatctggggatattctgtttttcaccatagaactgtatggtctcccaaatgtcccttcgcgtattctatctgaagagtgtttcaaatttgctggatcaaaagaaaggtttaactctcagtggtgaatccagatatcagaaaggagtttcaccagtagctttcttctgatttttaatgggggatattgtttttttcaccataggcctcaatgggcttccaaatgtcccttctcaggttctaaaaaataagtgtttccaacccgctgaatcaaaggtaaagcttatctctgtgagttgaatccacacatcacaaagtagtttcacagattgctactttgtagtttttgtctgtgaatattttgtttttcaccgtagacctcaaaaagcttccaaagacaaaaacgcccttcacagattctgccaaaaaagtttttccaacctgctgaaacaaaagaaaggtttaactctgagagatgaatccacacatcgcagagcagtttcacagatagcctctttctaatttttatctgggaatattctgtttttcaccataggtctcaatgggctcccacatatccctttcctgattttaccaatagagtgtttccaaactgctgaatcaacagagaactttaactctgtgagaagaatccacacatcacaaagtagcttcactaaaagcttctctgtagcttttatctttgaatattccatttttcaaagtgtgctacaatgggctcacaaatgtcccttaacagatctagcaaaagagtgtttgcaacctgctgaatcaaaagaaaggtttaacctttgagctgaatccacacttaacaaagcagtttcacagatagcttcttgatagtttttatgtggggatattctgttttacaccataggcctctatgggcttataagtgttccttctcagattctttctaaagactgtttccatcctgctgtatcagaagaaagtttaactctgtgcaatgaatctacacatcacagagcacttcacaaatagattctttctagtttttatctggggatattttgtttttcacaataggcctcaagggacgccaaaataccccctcacagtttccaaaaactgagtgtttcaaacctgtggaatcaaaggaaaagtttaaagtctttgaggtgaatccacacatcacaaagcattttcaaggatagcttctttctagtttttatctggggatattcgatttttcaccataggctttaatgggctcccaaatgtcagtatacaaattataaggcaaaagtatttgtaacctgctgagtcaaaataaaggtttaaatctgtgagatgaatccacacattacaaagcagttactcggatagcttttttctagcttttatctggagatattcagtttttcaccttaggcctctatgggctcccaaatgtgtttccacaaattctaccaaaagactgtttccaagctactgaatcaaaagaaatgtttaactctgtgagatgaacccacacataaaagcagttttagagacagagtctttctaggctttatcttgggatatttggttattcaccagagtccaaaaaaactgttattctaccaaaagaatacttccaacctgctgaatcaaaagataggtttaactcagtgagatgaatccacacatcacagagcagtacaacagatagattccttcaagtttttatctggggatattgggtttttcaccttaggtctctatgggcttccaaatgtctctctgcaggttctataagacgtgtttccaacttgctgaatcataagaaatatttaactctgtgagatgaatcctcaatcacatagcagtttcactgataccttcttcctagtatttatatgaagatatttggtttttaaacttaggcctctatgggctgccatatttccctttgcagattcttccaaaaaagtgtttcaaatctgctgtatcaaaagaaaggtttaactctgtgagatgaatccacatatcacaaaatagtttcactgatactttctctctggtttttatgtgtggatattctgtttttcaccatatgcctctgagggctcacaaacatcctttagcagaatctccaaatagagggtttccaaactactgaatgaaaagaaaggattaactctttgaggtgaatctcaaattacaaagcagtttcactgataggttctttctagttcttttctgggaatattttatttttcaccttagtcctcaaagtgctcccaaatttaccttcacagattttacctaaagagagtgtttcaggaagtcagggaccccaatcagagggacgagctgaagccatggcagaagaacataaattgtgaagatttcatggacatttattagttccccaaattaatacatttatttcttacacctgtctttactgcaatctgtgaatataaattgtgaagatttcatggatatttatcacttcccctatcaatacccttgtgatttcctttgcatgtctttaatctcttaatcccatcagcttcttaagctgaggatgaatgtcatctcgggaccgcgtgatgattgcattaactgcaaaaattgtttaaacaatatgaaatctgggcaccttgaagaaagaacaggatagcagtgatgttcagggaacaagggagacaaacattaggtctggctgcctgagagccgggtggaacggagccgtatttctcttctttgaaaagcgtataggagaaatatggctgaattctttttctcagcaaggaacagccctgagaaagagaatgcattcctagggttatgcatctgaaatggcttccctgggaacatctgtcttttactgttgtagataagggatgaaataagccccagtttcccatagtgctcccaggcttattagaatgaggaaattcccacctaatatattttggtcagaccggttgtctgttctcaaatcctgtctcatgataagatgttatcaatgacaaagcatgcccgaaacttcattagcaattttaatttcgccctggtcctttgatctcaccctgcctccctttgccctttgatattttattacattgtgaagcatgtgatctctgtgacccgcatcctgctcgtacaccccctctccttttgaaaatcactaatgctggttttatggctcagggggcatcacggaacctgccaacatgtgatgtcacccctggacacccagctttaaaaatttttgtctttgtaattttctgttaatttcttagaccagtcaacacttaggtaaaatagaataggactcatgttgaaatatcgggggctgaatttcccctaacagagagtttcaaacctattgtatcaaaataaaaatttatctctgtaagatgaatgcacacatcacaaagcagtttcaaagacagcttttatctagtttttaactagggatattcggtttttaaccataggactcaaaattctcccaaatgttccctcatacattctaaccaaagagtgtttccaacttgctgagtgaaaagaaagattcaacactctgagatgaagcgacatatcaaaaagcagtttaacagatagtctcttcctagtttttatctgcagatatttggtttctcaccaaaggactcaaaggactttcaaaagtcccttcgcagactctgcaaaagtactgtttgcaacatgctgaatgtaaacaaaggtttacctctctgggatgaatccacacatcaaaaagaagtttcacagatagaccctttctagttttgatcttgggatatttggtttgtcaccataaactacagtgggctcaaaaaagtcccttcacagattctagaaaaaaagtgtttctaacctagtgaatcaaaaacaagtttaaccctttgagatgaatccacatatcactaagctgtttcacagagagcttatttttagtttttatctgggggtattctgtatttcaccataggcctttggggttcccaaacctccctttacagattctaccaaaagagtgtttcaaacctgcttaataaaagaaaagttttaactctgtgagttgaatccacatgtcacaaaaaagtttgacagatagcttctttctagattttatctggggatattctgtttttcaccataggcctctatgggttcccaaatgtcccttcacagattctacctaaagagtgtttcaaacctgctttagcaaaagaaaaatttaactctgtgagacaaatccacacatcacaaagctgatttacagatagctttttcctagtttttatctgaggatattttatttttcaccataggcccctgtgggctcccaaatgtccctttgcagatactaacaaatagtgtttccaagctgttaaatgaaaacaaatgtttcccactgtgagatgaatccacacgtcagaaagcagtttcacagatagcttttttctagtgtttatctgggaatatttggttttccaccacaggcctctgtggactcccaaaatatcttcacagattccacaaaaagagtgtacaaaacttgctgattcaatagagtggttaatctctgtgagatgaatccacagattatagggctgtttcacagaaagcttttttctagtttttatctgtgaacatttgtctcaaaaagcttcaaaatttctctttgcagtttctatgaaaacagtgtttccaacatgctgtatcaaaagaaacgttgacctctatgagatgaatccactcatcaaaaagaagttcacagatagcttcttcctagtttttatctggggatattgagtgctttttttttaaacataggcctatacaaggctatagtaaccaaacagcatggtactggttccaaaacagagatatagaccaatacaacagaacagagacctcagagataataccactcacacacaaccatctgatctttcaaaaaactgacaaaaacaagaaatggggaaaggattccctatttaataaatggtgctgggaaaactggctgaccatagatagaaagctgaaactggatcccttccttacactttttaaaaaattaattcaagatggattaaagacttaattgttagacctaaaaccaaaaaatccctagaagaaaacctaggcaatacaattcacgacataagcatgggcaaggacttcatgtctaaaacaccaaaccaatggcaacaaaagccaaaattgacaaatgggacctaattaaactaaagagcttctacagagcaaaagaaactaccatcagagtgaacaggcaacctacagaatgggagaaaatttttgcaatctactcatctgacaaagggctaatatccagaatctacaaagaactcaaacaaatttacaagaaaaaaacaaccccaccaaaaagtgggcaaaggatatgagcagacacttctcaaaagaagacttttatgcagccaaaagacacatgaaaaaatgttcatcatcacgggccatcagagaaatgcaaatcaaaaccacagtgagataccatctcacatcagttagaatggcgatcattaaaaaatcaggaaacaacaggtgctggagaggatgtggagaaataggaacacttttacactgttagtgggactctaaattagttcaaccattgtggaagacatcatggaaattcctcaatgatctagaatgaaaaataccatttgacccagccatcccattcctgggtatatacccaaaggattataaatcatgctgctataaagacacacacacacgtatgcttactgtggcactattcacaatagcaaggacttggactcaacccaaatatccatcaatgatagactggattaagacatatacaccattgaacagtatgcagccataaaaaatgatgagttcgtgtcctttgtaaagacatggatgaagctggaaaccatcattctcagcaaactatcacaaggataaaaaagcaaacaccgcattttttcactcataggtgggaattgagcaataagaacacatgcacacaggaaggagaacatcacacaccggggcctgttgtgaggttagggtatggaggagggttagcattaggagatatacctaatgctaaatgactatttaatgggtgcagcacacctacatggcacacgtatacatatgtgacaaaacgaaacactgtacacacgtaccccagaaattaaagtataataataaaaaaagagagattcaaacttgctgtatcaaaataaaaatttaacaccgcaagatgaatacagatatcacaaagcagtttctctttcttaaattttattattattatactttaagttttagggtacatgtgcacattgtgcaggttagttacatatgtatacatgtgccatgctggtatgctgcacccattaactcgtcatttagcattaggtatatctcctaatgctatccctcccccctccccccaccccacaacagtccccagagtgtgatgttccccttcctgtgtccaggtgttctcattgttcaattcccacctatgagtgagaacatgtggtgtttggattttgtccttgtgatagtttactgagaatgatgatttccaatttcatcgatgtccctacaaaggacatgaactcatcattttttatggctgcatagtactccatggtgtatatgtgccacattttcttaatccagtctatccttgttggacatttgggttggttccaagtctttgctattgtgaatagtgctgcattaaacatacgtgtgcatgtgtctttatagcagcatgatttatagtcctttgggtatatacccagtaatgggatggctgggtcaaatggtatttctagttctagatccctgaggaattgccacactgacttccacaatggttgaacaagtttacagtcccaccaatctccagcacctgttgttccctgactttttaatgattgccattctaacaggtgtcagatggcatctcatggtggttttgatttgcatttctctgatggccagtgatggtgagcattttttcatgtgctttttggctgcataaatgtcttctcttgagaagtctctcttcatatacttcgtccactttttgatggggttgtttatttttttcttgtaaatttgtttgggtacattgtagattctggatattagccctttgtcagatgagtagcttgcaaaaattttctcccattttgtaggttgcctgttgactctgatggtagtttcttttgctgtgcagaagctctttagtttaattagatcccatttgtcaattttggctttggttgccatagcttttggtgttttagacatgaagtccttgtccatgcctatgtcctgaatggtaatgcctaggttttcttcaagggtttttatggttttagttctaacttttaagcctttactccatcttgaattaatttttgtataaggtgtaaggaagggatccagtttcagctttctacatgtggctagccagttttcccagaaccatttactaaatagggaatcctttccccatttcttgtttttctcaggtttgtcaaagatcagatagttgtagatatgcggcgttatttctgagggctctgttctgttccattgatctatatctctgtttttgtgccagtaccatgctgttttggttactgtagccttgtagtatagtttgaagtcagatagtgtgactatttccttcaattcttctctgattttagttatttcttgccttctgctagcttttgaatgtgtttgctcttgcttttctagttcttttaattgtgatgttagggtgtcaattttggatctttcctgctttctcttgtgggcttttagtgctataaatttccctctacacactgctttgaatgtgtcccagagattctggtgtgttgtgtctttgttctcgttggtttcaaagaacatctttatttctgccttcatttcgttatgtacccagtagtcattcaggagcaggttgttccgtttccttgtagttgagtggttttgagtgaattccttaatcctgaattctagtttgattgcactgtggtctgagagagagtttgttataatttctgttctttgacatttgctgaggagagctttacttccaactatgtggtcaattttggaataggtgtggtgtggtgctgataaaaatgtatattctgttgatttggggtggagagttttgtagatttctattaggtctgcttggtgcagagctgagttcaattcctgggtatccttgttgactttctgtctcgttgatctgtctaatgttcacagtggggtgttaaagtctcccattattattgtgtgggagtctaagtctctttgtaggtcactcaggacttgctttatgaatctgggtgctcctgtattggcttcatatatatttagaatagttagctcttctttttgaattgatccctttaccattatgtaatggccttctttgtctcttttgatctttgttggtttaaagtctgttttatccaagactaggattgcaacctctgcctttttttgttttctatttgcttggtagatcttcctccatccttttattttgagcctatgtgtgtctctgcacatgagattggtttcctgaatacagcacactgatggatcctgactctttatccaatttgccagtctgtgtcttttaattggagcatttagtccatttacatttaaagttaatattgttatgtgtgaatttgatcctgtcattatgatgttagctggttattttgctcgttaattgatgcagtttctttctagctttgatggtctttacaatttggcatgattttgcagtggttggtaccagttgttcctttccacgtttaatgtttccttcaggagctcttttagggcaggcctcgtggtgacaaaatctctcagcattagcttgtctgtaaagtattttatttctccttcacttatgaatcttaatttggctggatatgaaattctgggttgaaaattcttttctttaagaatgttgaatattggcccccactctcttctggcttgtagagttgctgctgagagatccgctgttagtctgatgggcttccctttgagggtaacccgacctttctctctggctgcccttaacattttttccttcatttcaactttggtgaatctgacaattatgtgtcttggagttgctcttcccgaggagtatctttttggcgttctctgtatttcctgaatctgaatgttggcctgccttgctagattggggaagttgtcctggataatgtcctgcagagtgttttccaacttggttccattctccccatcactttcaggtacaccaatctgacgtagatttggtcatttcacatagtcccatatttcttggaggctttgttcatttctttttactctaaacttcccttcatgcttcatttcattcatttcatcttccatcactgataacctttcttccagttgatcccatcagctcctgaggcttcggcattcttcacatagttctcaagtctttgctttcagctccatcagctcctttaagcacttctctgtattggttattctagttatacattcgtctaaatttttttcaaagtttttaacttttttgcctttggtttgaacatcctcctgtagctcagattagtttgatcatctgaagccttcttctctcaactcgtctaagtaattctccatccagctttgttgcgttgctcgtgaggagctgcgttcctttggaggaggagatgccctctgctttttagagtttccagtttttctgctctgttttttccccatctttgtggttttatgtacttttggtctttgaggatggtgatgtacagatagtttttggtgtggatatcctttctgtttgttagttttctttctaacagacaggaccctcagctgcaggtctgttggagtttgctagaggtccactccagaccctgtttgcctgggtatcaagagcgttggctgcagagcagctgatttttgtgcaccacaaatattgctgtctgatcgttcctctggaagttttgtctcagaggagtacctggccgtgtgatgtgtcagtctgcccttactggggggtgcctcccagttaggctgctcaggggttcggggtcagggacccacttgaggaggcactctgcctgttttcagatctccagcttcatgctgggagaaacactgctgtcttcaaatctgtcagacaggaacatttaagtctggagaggttactgttctttatttttgtctgtgccctgcccccagaggtggagcctacagaggcaggcaggcctctttgggctgtggtgggctccatcaagttggagcttcccggctgctttgtttacctaaggaagcctgggcaatggcgggtgcccctcccccagccttgctgccaccttgtagtttgatctcagactgttgtgctagcaatcagtgagacttcgtgggcataggaccctccaagaaggtgtgggatgttttctcctggtgtgccgttttttaagcccattggaaaagtgcagtattagggtgggagtgacccgattttccaggtgctgtctgtcacccctttctttgactaggaaagggtactccctgaccccttgaatttcctgagtgaggcaatgcctcgccctgcttcgccttgcacatgctgtgctgcaccaactgtcctgtgcccactgtctcgcactccctagtgagatgaacccggtatcccagatggaaatgcagaaatcacctctcttctgtgtcactcacactgggagctgtagactggggctgttcctatttgtccatcttggctgcccacaaaccagtttcaaagacagctttttttctagtttttttctggggacatttgttttttcaccataagcctcaaaatctcccaaatattcctcatacattctaaccaaaaagtgtttccaacttattgagtaaaaagaatggttcatcattgtatctcatggagttaaacctttcttttgattgaacaatttggaaacactttttttttgcagactctgcaaatggataattgggagtgtattgaggcctatggtggaaaaggaaatgtcttcagataaaaactagaaagaagctttctgagatactgctttgtgatgtgtgtattcatctcacagagataaatcttcgttttgattgagtagtttggaaacactgtttttctaggatctgagaaaggatacttggaaagaaatgaggcctttagtgaaaaaggaaatatcttgagacaaaaactagaaagaagctttctgattaactgctttgtgatgtgtacgtgcatctcacaaagttaaacctttcttttgatagagtatcttggatacactgtttttgtagaatctacataggaatatttgggagcacattgaatccccttttgaaaaaggaaatatcttcacataaaaattagacagaagcttttctgagaaaatgctttgtgatgtctgcttttatgtcacagaatttaatcattctttagattaagcagttttgaaacacggtttttttagaatctgtgaaaggatatttgggagcacatggggcccatggtgaaaaagtaatattctcagataaaaagcagaaagatgctttctgagaaactgtttagtaatgtctgcattcatcttatagagttaaacttttcttttgattgagcaggttggaaactatgtttttggagaatctgccaatggatatatgagcgcacattgagttttatggtgaaaaaggaaatatcttaagataaaaattagaaagaacctttctgagacactgctttgtgttgtgttcattcatctcacacagttaaaactttattttgattaagcagtttggaaaaactgtatttgtagaatgtgcaaagggatatttgggaattcattgaggcctaaggtgaaaaaggaaatatcctcagaaaaaaactagaaagattaaggagaaactgctttgtgttgtgtgcattcatctcatagagttaaacctttcttttgattgagcagtttggaaatactgtttttgtagaatcagggaaggaatatatgggagcacattgaggcctacagtgaataaggaaatattctcaggcaaaaactagaaagaagatttctgattaactgttttgtgatgtgtccattcatgtcatacagttaaacctatcttttgattgaacatcttggaaacactatttttgtagattctgtgaagggatatttgggagcactttgaggtctatggtgaaaaaggaattgccttcacataaaaactagaaagaagctttatgagaaacggctttgtgatgtctgcattcatctcacagagttaaatatttcttttgattgagcagtttggaaacactgtttttgtggaatctgtgaagggatattttgtagcatgttggtgcctattcagagaaaagaagtacctcagataaaaatcagaaagatgctttctgaggaactgctttgcaatgtgtacgttcatctcacagagtcatacctttcttttatttgagaagtttggaaacactatttttgtagactctgtgaagggatatttgggagcgctttgaggcctatggtgaaaaaggtgatatcttcacattaaaacaagaaagacacattctgagaacgtgctttgtgatgtgtgcattcctcacacagatataaagctttcttttgattgagcagtttggaaacactgttttggtagaatcttagaaaggatacttgtgaatgcaatgaagtctatggtgaaaaaataaatatcctgagataaaaactagaaagaatctttcttattaactgctttgtgattagtccattcatcacacagagataaacctttcttttgattgtgcatcatagaaacactgttttgtagaatctgtgaagggatatttgggagcacctgaggcctgtggtgaaaaaggaaatatctccacataaaaactagtaagaagctttctgagaaactgctttgtgatatatgtactcatctcacagagttaaaactttccttttagtgagcagtttggaagcactgtttttgtagaatctgtcaagggatatatgggaatgcattgattcctatggcgaaaaatcaaatatcttcacataaaaactaggaagaaactttcagagaaactgctttgtaatgtcagttccgtctcacagaggttaagcattcttttgattgagcaattttcaaagacagttttagtggaatctgtgaaaagatacttgggagcgcattgaagctcatggtgaaaaaggataaatcctcagaaaaaactagaaagaatctttctgattaactgatttgtgatgagtccattcatcacacagagttaaaccattcttttgattgcacagcttggaaacactgttttgttgaatctttgaagggatatttgggagcacaagaggccaatagtgaaaaagataatatcttcaaataaaaacagaaagatgctttctgagaaactgctttgtgacatgggcattcatctcatagagttaaagatttcttttgattgagcagtttggaaacactgtttttgcaggatatgccagtggatatatgggagcactttgaggcctatggtgaaaaagaaaatatattttgaagaaaactagaaagaagttttctgagaatctgtgtggtgatgtgtgcattcatctcacagagttaaaactttcttttgattgagtggtttggtaacaacatttttgtagaatctgtgaagggatatttgggaacaccttaagaactatggtagaaaatgaaatatcatcagataaaatctagaaagaagcttttttagacactgctttgtgatgtgtgcattaatctcagagttaatcctttcttctccttgagaagtttggaaagactgttttgtagaatctgtgagggatatttgggagcgccttgaggactatggtgaaaaaggaaatatcttcagataaatctagaaagaagctttgtaggaaactgctttgtgatgggtgcattcatctcatagagttaaacctttcttctgatcaagcagtttggaaaaactgtttttgtagaatctgcaaaggaatatttaggaaagcattgaggcctatggtgaaaagggaaatatcttcatatataccagaaagaacgtttctgagaaactgctttgtgatgtgtgcatacatctcacagagttaaactactcttttgactgagcagtttggaaacactgtttttggagaatctgtgaagagatatttgggagtgccttaaggactatggtggaaaagtaaatatcatcagataaaaactagaaagaagttttttgagacactgctttgtgatgtgtgcatttatctcacagagttaatcctttcttttcattgagcagtttggaaagattgtttttgtagaatctgtgagggatagtcgggagcacattgaggcctatggtgaaaaaggaaatatcttcagataaatctagaaagaagctttgtgagaaactgctttgtgatgggtgacttcatctcacagagttaaacctttcttctgattgagcagtttggaaaaaatgtttttgtagattctgcaaagggatatttgggaacacattgaggcctgtggtgaaaagggaaatttcttcaggtaaataccaggaagaagctttctcagaaactgctctgtgatgtgtgcattcatctcacagagttaaacatttcttctgattgagcaatttggaaacactgtttttatagaatctctgaaaggatattttggaatgcattgaagcctatggtgaaaaagaaaatatcttcagataaaactaggaagatttctgagaaacacctttggaacgtgtgctttcatctctcagagttaatcttttcttttgattgagcagtttggaatgtctatttttctagaatccatgaagggattattgggagcgcattggggccaactgtgaaaaaggaaatatctttagataaaaactagaaagcagctttctgaaaaacttctttgtgaaatctgcatttggctcacaccattttgcattcttttgattaagcagtttgcaaacagtttttgtagaatctttgaaaggatatttgggagtgcattgaggcctatggtgaaaactgaaatatcttcatataaaaaccagaaagatgcattatgagaaactgctttgtgatgtgtccattcatctcacagaaataaacttttattttgattgagcagtttggaaacactgtttttttcttcaatctgccaagtgatacatgagagcacattgaggcctatggtgaaagaggaaatatcttcagagaaaagctagaaggaagctttctgaaatactgttttgtgatgtctgcattcatctcagagagccaaacacttcttttgatttactcatttggaaacactgattttttagaatctacgaagggatatttgggagcacattgaggactatggtgaaaaagcaaatatcttcagagaaaaactagaagcaagctttctgaaacactgctttgtggtgtctgtattcatgtcagagacttaaacttttcttttgattgacctgtttggaaccactgatttttcagaatctgtgaagggatatttgggagctcattgaggactatggtgaaaaagaaaatatcttctgacaagaactagaaagaagctctctgagaaactgcatagtgatgtgtgcattcatctcacaaagttaaatgtttctttgatttagctgtttggtaacaacacttttgtagaatctgtgaagggatatttgggagtgcattgaggcctatggtgagaaggaaatatcttcagataaatactaatagaagctttctgagaaagtgctttgtgatgtgtacattcatctcacagagttaaagttttgttttgatagacctgtttgtaaacactgatggtgtagaatctgtgaagggatatttgggagagcattgaaggctatggtgaaaaaggaaatatcttcagaaaaaaactagaaagtagctttctgagaaactgatttgtgatgtgcccattcatctcacagagttaaaactttcttttgattgagcagcttggaaacactgtttttgtagaatctgcgaagggatatttaggagcacattgaggcctatgatggaaagggaatcatcttcgcttaaaaattacaaagaatctttctgagaaaattctttgtgttgtgtgcattcgtctctcagagctaaacatttctgttcattgagagttttggagatactgttttcgtggaatctgagattgcatatttcggagcacattgtggcctatagtgaagaaggaaatatcttcccataaaaaccagaaagaagctttctcagaaactgctttgtgatgtgtacattcatctcacagagttaaagttttcttttgattgaccagtttggaaacgctgttattgcggaatctgcaaaggcatatttgggagcgcctagaggcctatgttggaaaatgaaatatcttcagataaaaactagaaagaagctttcagagacactgctttctgacgtatgcattcatctcacagagcacaacctttcttttgattgatcagtttggtaacaatgtttttgtagaaatcatgaagggatatttaggtgtgcattgcatcctatgctgaaaaaggaaatatcttcagataaatactagaaagaagttttctgagaaactgctttctgatgtttgcattcacctcacaaagttaaaactttcttttgattgggcagtttggaaacactgtttttgtagaatctgtgaagggatattttggaatgcattgaagtatgtggtgaaatagggaatatcctcaggtaaaaactagagaggtttctgagaaacaactttgtgatgtgtgctttcatctcacagagttaatcatttcttttgactgagcagttaggaaactgtgtttttctagaatctgtgaagggatatttgggatcacatttaggcccatggtgaacaattaaatatctttagataaaatctagaaagaagctttctgagacactgctttgtgatgtgtgtattcatctctcagaggtaaacctttcggctgattgagcagattggaaagactgtttttgtgaaaactgcgatgggatatttgggagcgcattgaggcctatggtgaaaaaggaaatatctgcagatgaaaactagacagaagctttctgagaaactgctttgtgacgtgtgcattcatctcacacaattaaaattttctttgactgatcagtttggaaacactgattttgtggaatctgcaaagtgatatttggaagtgcattgatgcctatggtgaaaaagaaaatatcttcaggtaaaaactagaaagaagctttctgagacactgttttgtgatgtgtgcattcatcttacagagataaagctttctgttgattgagcagtttggaaacactgtttctctagaatttgcagaagggtacttgggaatgcaatgagtctgctggtgaaaaaggaaatctcctcagacaaaaactagaaagaagctttctgattaactgctttctgatgtgttcactcatctcacagagttaaacttttcatttgattgagcatcttggaaacattgtttttgtagaatctgcaaagggatatttgtgagcacattaaggcctttggtgaaaaaggaaatatcttcagataaaaaccagtaggaagctttcagagaaactgctttgtgttgtctgcattcatctcacactgtttaagcattattttgattaatctgtttggaaacacagcttttgtagaatctgtgaaaggatatttgggaatacatttgggcctgttgtgaaacagaaatatcctcagataaaaaccagaaagatgttttctgagaaactgctttgtgatgtgtgcattcacctcacagtgttaaacctttctttagattgagcagtttcaaaacactgtttttgtagaatctgttaagggatataagggaatgcattgaagcctaaggtggaaaaggaaatatcttcacataaacactagaaaaaagctttctgatgaactgctttgtgatgtctgcattcgactcacagagtttaagcattcttttgattaagcagtttggaaacacaatttttgtagagtctgtgaaagcatacttggtagccgtttggggtctatggtgagaaaggatatatcctgagataaaatccagaaagactctttctgaagaactgctttgtgatgtgtgctttcttctcacagggttacacctttcttttgattgagaagtttggaaacactgtttctgtagattctgtgaagggatattttggagcacactgaggtctatggtgaaaaaggaaataacttcagataaagatcagaaagaagctttcagagaaactgctttgtgatgtgtgcattcatctcacagagttaagccattcttttgattgagcagtttggaaacactgtttttgtagaatctgcaaagggatatttgggagcacattgaggcctatggtgaaaaataaaatatcttctgttgaaaactagaaagaatctttctgagaaactgctttgtaatgtgtgcactcttctcgcatagttaaacctttcttctaattgagtagtttggaaacactgtttttctaaaatcattgaagggatatttgggaacgcattgaggcctatggtgaacaatgtgatatcctcagataaatactggaaagatttctgagaaacagatctgtgatgtgagcttttatcccacagagttaatcctttcttttgattgcaaagtttggaaactgtgtttttctagaatctgtgaagggatatttgggagcacattgaggcttattgttaaaaaggaaatatctttagctaaaaactagaaagaagctttctggaaaactgctttgtgaggtgtgtattcatctaacagagttaaacgtttcctttgattaagaagtttggaaacactgtttttatggaatctgcaaggggatatttggaagtgcattgagacctaaggcaaaaaaggaaataacttcagaagaaaactagacagcagctgtctgagaaactgctttgtgatgtgtgcattcatctcagagagttaatttttcttttgattaatcagtttggaaacactattttgtagaatttgtgaagggatatttgagagtccattgaggcgtatggtgaaaaaggaaatatcttcagataaaaacaagaaagaagctttctgagacagttttgtgatgtgtgcattcgtctcacagagataatgctttcttttgattgagcagtttggaaacaccatttttgtagaatctgtgaatgggtaatttggagtgcaatgaggcctactgtaaaaaggaagtatcctcagacaaaaactagaaagaagttttctgattaacttcgttctgatgtgtaaattcatctcacagagttaaacttttctgttgattgagcatcttggaaacactgcttttgtagaatatatgaagggatatttgtgagtacattgaggccttttgcaaaaatgaaatatcttcacataaaaactagaaagaaactttctgagaaactgcttagttttgtctgcatttgtcttacagagtttaagcattcttttggttaagcagtttggaaacacagtttttgtagaatctgtgaaaggatatttgggtgcacaatagggcctatggtgaaaaagacatattctcagataaaaaccagaaagatggttctgagaaactgctttgtgacgtgtgcattcatctcagagagttgaatgtttcttttgattgagcagtttggaaatgctggttttgtagaatgtgtgaagggatattttggagcacattttggcctatggtgaaaaagaaagtatcttcagataaaaaacagaaagaagctttcaaagaaactgctttgtgatgtgtgcattaatcttacagaattaaactgttcttttgattgagaagtttggagacatgttttttgtagaatctgcgaagggatacttgggagcacaatgaggccaatggtgaaaaaggaaatatcatctgatgaaaactagaaagattctttctgagaaacagctttgtgatgtgtgcattcatctcacaaagttaaacctttcttttgattgagcagtttgataacaatgtttttgtagaatctgcgaagggatattaggggtgcatagaggcccatggttaaaaagaaaatattttctgatgaaaactagaaagaaactttctgagaaactgctttgtgatgtgtgcattcacctcacagagttaaagctttattttgattgatcagtttggaaacaatgattttgtagaatctgtgaaggcatattttggagcacatcgaggcttatggtgaaaaagaaaatatcttcagatgaaaaatagaaagaagctttatgagaaactgctttgtgatgtgtgcattcgtatcacagagataatgctttcttttcatggatccgtttggaaacactgtttttctagaatctgcaaaagggtacctgggaacacaatgaggcctatggtgaaaaaggaaataccttcagacaaaaactagaaagaagctttctgaaaaactgctttgtgaagtgtgcattcgtctcttagagttaaagttgtcttttgattgataagtttggagacacggttttggtagagtctgtgaagggatatttgggagcaccttgaggcctatgttggaaaaggaattatcttcaaatagaaactagaaagaaggtttttgagacactgtgatgtgtgctttcatctcacagtgttaaacctttcttttgattgagcactttgggaagactgtttttggaggatctgcagaaggatatttgggcgtgcattgagggctatatggtgaaaatggaaatatctacagataaatctagaaaaaagcattgtgagaaactgtttgtgatatgtgtattcatctcacagagataaagctttcctttgattgagcagtttggaaacacggtttttgttgaatctgcaatgggatgtttgggagctccttgaggcctatggcagtaaaggaaatatcttcagataaaaactagaagaaagctttttgagacactgctttgtgatttgtgcactcgtctcacataattaaacctttcttttcattcagcagtttaggaacactgtatttttagaatcagcaaatagatatttgggagtgcattgaggcccaaatacactatggcaaaaaaaaagtgcattgagcactttgggaagactgtttttacagaatctgcaaaaggatattcgggagtgctttgaggcctatatggtgaaaagggaaatatcttcagataaatctagaaaaaaacattgtgagaaactgctttgtgatatgtgtattcatctcacagagataaacctttcctttgattgagcagtgtggaaacatggtttttgttgaatctgcgacgggatgtttgggagctccttgcggcctatggtggaaaaggaaacatcttcagataaaaattagaaggaagctttttaagacactgctttgtgatgtgtgcattcgactcacataattaaacctttcttttcattcagcagtttagaaacactgtatttttagaatctgcaaagagatatttgggagtgcattgaggcataaatccctatggcaaaaaagaaaatatctccagataaaaattagaaagtagtttttgagaatctgctttgtgatgtgtgcattcctctcacagagttaaacctttcttttgattcagctgtttggaaacactcttcttgtaggatctgtgaaaggatatttcagagcgcattgacacttatggtgaaaaataaaagttcttcagataaaaactagaaggaagctttctgagaaactgctttgtgatgtgtgcattcatctcacagagttaaagctttctcttgattcaacagtttggaaaactgtttttgtccattcagcgaatggacatcagacagctctttgactccaatggtgaataagtgaatatcccaggataaaaacaggaaggtagccatctgagaaactgctttgtgaagtgtgcactcttctcacagagttaaaccattcttatcattcagcagtttggaaacactgtttttgtattatgtgcaaagggatatctgggaatgcattgaggcctatggtgaaaaagaaaatatcttcagatgaaagctagaaagtagctttataagaaactactttgggatgtgtgcattcatcttacagcattaaacttttcttttgattcagctgcttggaaacactgtttttgtccattcaacaaaaggatatttgggagatcattgaggtgaatggtggaaaagtgaatatcctagtatagaaactagaaagaagctaccttaggaactgctttttgatgtgtgcactcgtctcccagagttaaacctttcttttcattcagcagtttggcaacactgtttttgtgctttctgagaatggacatctagggactcaatgaagccttggcaaagcagtgaatgtgcaaggataaaaactagaaggctggtatctgagaaaccactttgtgatgtgtgcattcattttgcagtttgaaaccattcttttcattcagaagattcaaaacactgttttccttgaatatgtaaagggatatttaggagtgtttagacgccaatagtgataaagaaaataccttcagagaaaaactaaaaagaagttttctgagaaactgctttgtgatgtgtgtattcacctcagagagttcaacatttcttttgattcagcagtttgcaaacactgtttatgtccattctaggaatggacattttggagatcattgaggccaatggtgagaaagaaaatatcccaggataacagctagaagaaagctatctgagaaagcactttgtgatttttgcattcatctcgcagagttaaacttttcttttcattaagcagtttggaaacactgtttatgtagaatctgtgaagggatactttggagtgcattgagggcaatagtgaaaaagaaaatattttcagataaaaactagaaagaaattttctgagaaacttctttgtgatgtgtgcattcatattgcacagttaaacctttcttttgattcttcagtttggaaacactatttttgtagaatctacaaagggttatttgggagcgccttgaggcctagagtgaataaatatattccaataaaaactaaagtaagatttctgagaaactgctttgtgatgtgtgcatcttgcagagttgaaaagttcgtttcattcaacagtttggaaacactgttttttagaatcttcaaagggatatttgggagtgcgttgaggcctatgatgaaaaataaaatatcttcagataaaaagtagaaagaagctttctgagaaacagttttgtgatgtgtccatacatctcacagggttaaacctttctattgattcagcagtttggaaagactgtttttgtagaatctgtgaagtgatgtatgggagtgcattgaggccaacagagaaaaagaaaatgtcttcagataaaaacaagaaacaagattttgagatactgctttgtgatgtgtgcattcatctcacagagtgaaattttcttttgattcagcagtttggaaacactgtttttgcataatctacaaagggatacttgggagcacattgaggcctatggtgaaaaagaaaatttgctcggataaaaactagaaagatgctttctgagaaactgctgtgtgatatgtgcattcatctcacagagttaaaagtttctattcattcagcagtatggaaacactgtttttgtccattctgtgaatggacatttgggagctcattgaggctgactgtgaaaaagagaatatcccaggataaaaactagaatgaagctatctgagaaacctctttatgatgtgtgcattcatctgatagagttaaactattttttcattcagcagtttgcaaacactatttttgtaggttctgcaaatgggtatttgggagcgtattgtggcctatggtgaaaaagaaaatatcttcagataaaaactagaaggactctttctgaaaaactgctttgtgatgtgtgcgttcatctcacagagttgtacatttcttttcattcagcagtttgtaatgttttttgtccattctaccaatggacatttgggagttcattgatgccaatggcgaaaaagtgaatatcccaggacaaaaaccagaaggaagctatctgagaaactgctttgtgatgtgtgcattcctctcagggaattaaaactttcctttcattgggcagttcggaaatactgtttttggtgaatctgcaaagggatattttagagcacattgaagcctaaggtgaaaaagaaaataccttcagataaaaactagaaagaaactttcggagaaactgctttgtgatgtgtcattcatctcccaaagttaaacctttcttctgattcagcagtttggaaacaatttttgtccattttgcaaatggaaatttggcagcatatttaggtcaatggcaaaaaagcaaatatcccagaataaaaagtagaaggaagctttctgagaaacttctttgtgatatgtgcattcacctcacagagttaaaagtttcttttgattctgaattttggaaacactgtttttgtccattctgtgaatggacatcggggagctctgagaccaatagcaaaaaagcgaatatctcaggataaaaactagaaggaagctgtctgacaaactgctttgtgatgtatgcgtacatcttgcagagataaaccgttcttttcattaagcagtttggaaatactgcttttgtagaatctgtgaagggatattttggagctcattgaggcctaaggcgaaaaatcaaatatccaaagataaaaactagaaggaagatatctgagaaactcctttgttatgtgtgcatttgtctcacagacttaaaactttcttttgattcagcactagaaaaaagctttgtgtttgcagaataaaacttttcattcagcagtttggaaacactgtttttgtagaatctgcaaaggaatatttgtgagtgcattgaggcctatggtgataaagagaatatgtttggatcaaaactagaaagaagctttctgagtaagtgctttgtgatatgtgcattcatcttgcagagtgaaacctttttattttggcagtttggaaacactgtttttgtccattctgcaaatggacatctgggagctcaatggagtcaatggtgaaaaagaatatgccaggataaaaactagaagaaatgtatctgagaaaccactttgtgaggtgtgcattcattttgcagactgaaaccattcttttcattcagcagtttggaaacactgtttttctagaatctgcgaaggaatatttgggagcattttgaggcctacggtgaaaaagaaaatatcttccgataaaaattggaaagaagatttctgagaaactgctttgtgatgtatgcattcatgtcacagagttaaacctttcttttgattcaccagtttggaaacactgtctttgtagaatctgtgaagggatatttgggaacccattgaggcctatggtgaaaaagaaatcttctgataaaaactaaaagaagctttctgagaaactgctttgtgatgtgtgcattcttcttgcagagttaaaccgttcttttcattcagcactttggaaacactgtttttgtagaatctttgaagggatatttgggagcgcattgaggcctatgttgaaaaagtaaatatcttcagataaaaattaaaaagaagctactggagaaacagctttgtgatgtgtccattcatctcacagcattcaactttttttttgaatcagcagtttggaaagactgtttttgtagaatgtgcaaagtgatatatggcctcattgaggccaatagtgaaaaagaaaatatcttcagataaaaacaagaaagaagctttctgaaaaactgctttgtgatgtgtgcattcctctcacggagttaaaactttcttttctttggggaatctggaaatattgtttttttagaatctgccaagggataatttggagcacattgaggccaatagtgaaaaccaaattatcttcagataaaaactagaaagaagttttttgagaaactgctttgttatgtgtacgttcatctcatagagctaaacctttcttttgattcagcagtttggaaacactgttttggtccattcagtgaatggatatttgggagctcttgggccagtaatgaaaaagtgaatatcccaggttaaataactggaaggaagctgtctgagaaactactttgtgatgtgtgcatatatctcacagagataaaccattcttttcattaagcagtttggaaacacagcttttttaggatctgtgaagggatatttgggagctcattgatgccaaaggtgaaaaagcgaatatccaaagataaaaactagaaggaagatatatgagaaaccctttgttaagtatgcattcatctcacagagttaaaactttttttgattcagcattttggaaatactgtttttgtagaatctgtgaagggatatttcggagcgcattgaggcctatggtgaaaaagaaaatatcttcagataaaaactagaaaaaaagctttatgagaaactgctgtgtgatgtgtgcatttatctcactgagttaaaacgttccattgattcagaggtatggaaacactgtttttgtagaatctgcgaagggatatttgggagcgcatgcggcctatggtgaaaaagaaattatcttcacataaaaattagaaggaagatttcaaagaagctgatttgtgtcttgtgcattcatctcagatagttaaatctttcttttattcagcagtttataaacactgtttttgtccattttgtgaatgggcttttgggagcccattgaggccaatggcaaaaaagcaaatatcccaggataaaagctagaaggaagctatctaagaaactgctttatgatgtctgcattcatctcacagagttaaacatttattttcattcagcactttggaaacagtgtttttgtagaatctgcaaagggatatttgggagcatattgaggcctatggtgaaaaaggaaatatcttcagattaaaacgagaaaggaccatcctgaaaaactgcttcatgatgtgtgcattcatttcacagagctaaacttttctttcaattctgcagtttggaatgactctttttctccattctgtgaatggacatttgtgagctcatcgagggcaatagccaaaaagccaatatcccaggataaaaactggaaggaagctatctgggaagcgactttgtcatgtgtgcattcatctcacatcatgaaacctttctttttcatttagcagtttggaaacacggtttttgtagaatctgcgaagtgatatttgggagcacattgaggcctatgttggaaaagaaagtatcttcagataaaaactgaaaagaagctttctgaaaaactgctttgtgatgtgtgcattcatctgacagagtgaaaactttcttctgattcagcagtttggaaacactgtttttatccattctgcgaatggacatttgggagctcatagacaccaatggcgaaaaagtgaatataccaggataaaacctagaaggaagctatctgaaaaactgtcgtgtgatgcgtgaattcatctcacagtgataaaccattctttccattaagcagtttggaaacactgtttttgtagaatctgcaaagggatatttgggagcacactgaggccaatggtgaaaaagaaaatatcttcagataaaaactagaaagaagctttctgagaaactgctttgtgatgtgtgtattcacttcacagagttaaaagtttcttttgaatcagcactttggaaaaactgtttttttccattctgcaaatggacattcaggagctcattgaggtcaatggtgaaagactgaatatcccaggataaaacctaaaaggaagctatctgagaaaccactttgcgatgtgtgcattcatctcacagagttaaatttttcttttgattcagcagtttggaaacactatttttgtccattctgcgagtggacatatgggagctcattgagaccaatggtgattacacaaatgtcccaggataaaaactagaaggaagctctctgagaaacagctttgtgatgtgtgcattcatttcacagagtttaaactttcttttgattcagcagtttggaaatgctgttttcccagaatctgagaagggatattagggagctcattgaggccaaagttgaaaaagaaattagcttcagataaaaactggaactgaaaaactgctttgtgatgtgaacattcatctcacagagttaaatttttcttttaatttagcagtttggaaacattgtttttgcccattctgcgaatggacatctgggagttctttgagaccaatggcgattatgcaattataccaggataaaaactagaaggaagctatctgagaaaccgctttgtgaagtgtgcattcatttcacagagtgaaacctatcttttcattcagcagtttggaaacactgtttttgtagaaatatctaagggatattttgagtgcattgaagcctgtggttaaaaagaaaatatactcagatgaaaactagaaagaaggtttctgagaaactgctttgtgatgtgtgcatttatctcacagagcaaaacttttctttttattcagccgtttggaaacactgtctttgtccattctgcaaatgggcattttggagctcactgaggtcaatggcaaaaaaacaaatatcccacggtaaaaataagaagaaatctatctgagaaaccgctctgtgatgtgtgcattcatctcactaagttaaacctttctgttgattcataagtttggaaacactgtttttccacaatctgcgaagggatatttgggaacatattgagcactatggtgaaaggaaaatatcttcagatacaaactactaagaagctttctgagaaactgctttgtaatgtgttcattcgtctcccatagtcaaaactttcttttgatttgtgagtttggaaacactgtttttgtcctttctgtgaatggatattttagagctcattgaggccaatgacaaaaaagtgcaaatccaaggataagaactacaaggaagctatctgagaaaccgatttgagatgtctgcattcatcttgcagagttaaacatttgttttcatgcagtagtttggaagaactatttttctagaatctgcacagtgatatttgggagcgcattgaggcttagggtggaaaagaaaatatcttcagataaaaattataaagaagctgtctgagaaaatgctttgtgatgtgtgcattcatcttacagagttaaacctttcttttgattcagcaggttggaaaccctatatttgtccattattcgagtggatatttggcatatcattgaggccaatggcaaaaaagcgaatatcccaggataaaagctagaaggaaattatctaagaaaccaccttgttgtgtgtgcattaattgcgcagagttaaagcttccttttcattcagcagtttggaaatgctttttttttgtagaatctgtgaagggatatatgtgagtgcattgaggcctatggtaaaaagaaaatatcatctagataaaaaactagaaagagattttctgagaaactgctaggtgattgtccattcctctcacagattgaaaccttcctcctattgtagcagtttggtaacaccattttagtctattctgcgaggggacattttggagcttatttaggccaatagcaaagaaacgaatatcacaggataaaaactagaaggaagctatctgagaaatggctttttgatgtgtgcatttatctcacagagttatacctttattttgattcagtagtttggaagcactgtttttgtagaatctgcaaagagatatttggtagcacattgacgcctctggtgaaaaagaaaatatcttcggataaaaactagcaagtaactttctgagatactgctttgtgatgtgtacactcatgtcacagagttaaaactttccttggattcagaggtttggaaacaccatttctgtagactctctgaaggtatatttgggagtccactgaggcctaaggtgaataagaaattaacgttgataaaatgtagaaagaatctttctgagaaaccactttctgataggtgcatgcatctcatagggttaaatgtttctttacattgagcagtttgaacacactgtttttggagaatctctaaagggatatttgtgagcgcattgaggcatgtgatgaaaaaaatgccttcagataaaaactagaaagaagctttctgagaaactgcttaatgaggtgtgcattcatctcacagagttaaacgtttcttttgattcagcagtttggaaacactgttttggttcattctgcaaatggacattttggaactctttgaggcctatggggaaaaagcaaatatccttggatagaaactagaaagaagctatctgagaaaccactttgtgatgtgtgcattcatctcacatagttaaacctttcttttcattcagcagtttggaaacactttttttgtacaatctgtgaagggatatttgggagtgtattgaggcctatggtgaaaaagaaaatatcttcagataaaaaggagtaggaatgtttctgagaaactgtttcatgatgtgtgcattcatctcaaaaagttaaacctttcttttgattcagcagtttggaaacactatttttctaaaatctgtgaagggatatttgggagtgcactgaggcctagggtgaaaaagaaaacatcttcagttaaaacctataaagaagctttctgagaaactgctttgggatatgggcattcatctcacagactttaacctttcctttgattcatatttggaaacactgtttttttttttagattatgcaaagggacatttgggagcaatttgaggcctatggtgaaaaagaaaatatcttcaggtaaaaactagaaagaagctttctgagaaactgttttgtgatgtgtgcattcgtgtcccagagttaaaattttcctttgaatcagcagtttggaaacactgttttgtctgttctgtgaatggacacttgggagctcattgaggccaattgagaaaaagtaactatcccagaataaaaactagaaggaagctatttgagacacccctttataatgtgttcattcatcttgcagagttaaaccattcttttcaatcaccagtttggaaaaactgtttttgtacaatctgcaaagggatatttggtagcacattgacgagtatggtgaaaaaaatcttcagataaaaactagaaagaaggtttctgtgaaactgaattgggatgtgtgcattcatgtaacagaggtaaacctttcttttgattcagcagtttggaaacactgtttttgtccattctgtgaatggacatttgaaagctcattgatgaaaacagcaaaaaagccaatatcccagggtgaaaactagaaggaaactgtctgagaaaccactttgtgatgtgtccattcatctcacagagttaaactgatcttttcattcagcaatttggaaacactgtttttgtagaatctgcaaaaggatatttgggagcaaattgaggccagtgttgaaaaagaaaatatctccagttaaaaactagaaagaagatttatgagtaattgctttgtgatgtgtgctttcatctcacagagttcaatctttctttttattcagcagtttgggaacattgcttttctagaatctgtgaagggatatttggtagcgcattgagccttacggttaaaaacaaattatcttcagataaaaacttgaaagaagcttagtaagaaactgctttgtgatgtgtgcattcatctcacagacttaaacatttctattgactcagcactttggaaacactgtttttgtccattctgcgaatggatatttgggagctcattgaggccaaaggcaaaaaagccaatatcccaggattaaaattagaaggaagctgtcttagaaaccgcttggtgatgtgtgcgttcatctctcagagttcaaccattagttgtattcatctgtttggaaacaccgtttccaggatatttcagagcacattgaggcctatagtgaaaaagaaagtatcttaagataaaaactagaaagaagttttctgagaaactactttgggaagtgttcatttatctaacagagttaaacctttcttttgattcggcagtttggaaaccctgtttttaaccactctgtgaatggacttttgggagctcattgaggtcaatggtgaaaaagcgaatatcccagtaaaaaaactagaaggaagctatctgagaaactgctttgtgatatgtgcaattgcctaggggagttaaatctttcttttcattcaccaatttggaaacaacgtttttacagaatcttcaaagggatatttgggagtgcaaggaggcctatggtgaggaaaaaaatatcttcagataaaagtagaaagaagttttctgaaaaactgctttgtgatgtgtgcattcatctcactgagttaaaccattccttggaatcagcagtttgtaaacacaatttttgtacattgtgtgaaagggcattttgtaactgattgaggtctaaggtgaaaaagcaaatatcccgggataaaaactagaaggaagctgttagagaaaccactttgtgatgtgttcattcatctggcagagttaaatctttcttttctttcagtagtttggaaacactgtttttgtagaatctgtgaatggacatttggcagcattttgaggcctatggtgaaaaggaaaataacttcagataaaaaatagaagaacgctttctgagaaactgcattgtgatgtgtgcattcacctcatagattcaaacctgtgttttgattcagcagtttggagacagtatttgtccattctgccaaaggacatatatgagttcatggaggccaaaggcaaaaaagaaaatgtccaagaataaaaccagacataagctatctgagaaaccgctttgtcatctgcacattcatctcatagaggtaaagcattctcttcattaagtaggttggaaacacagtttttgtagaatctgtgaagggctatttggagcttattgatgccaaatgtgaaaaagccaatatcccaggataaaaacaagaaggaagctatctgagaaactgctttgtaatgtgtacatttaactggcagagtgaaaactttcttttaattgaacagtttggaaacgagtttttgtagaatctgccaagggatatttgggaatgcattgaggcttatggtgaaaaggaaaatatcttcagataaaaactagagagaatctttctgagaaactgctttgtgctgtgtgcattcctctcacagagttaagcctatcttttgattcagcagtttggaaacactgtttttgtagaatctgtgaagggatacttgggagggcattgaggcctatggtgcaataaaaatatgttcagataaaaactagaaggaagctttcagagaaattactctgtgatgggtgcattcctctcacagcattaaacttttccttagattcagcagttctgaaagtctgtttttgtccattcttcgaatggacattttggaaatgactgaggccactgatgaaaaagccaacatcccaggataaaaaactagaaggaagctgtctgagaaactgctttgtgatgtgtgcattcatctcacagaggcaaacatttctgttgattcagtagtatgaaaactgtttttgtccattccatgaatggaaatttgggagctcattgaggttaatggtgaaaaaggaatatcccaagataaaaacttgaaggaagctatctgagaaacactttatgatgtgcacattcatcttgcagagttaaacctttcttttgattgagctgtttggaaatactgtttttatagaatctgcaaagagatatttgggagtgcatggaggcttatggtgaaaaaaatctcttcaaatacatctagaaagaagcttttggagaaattgatttgtgatgtgtccattcacgtcacagaggtaaacctttcttttgattcagctgtttggaaacactgtttttatccattctgtgaatggagagttgggagctccttgaagccaatggtgaaaaactgaatatcccagaataaaaactagaaggaagctatttgagaaatggctttgtgatgggagtattcatctcacagagtgaaaccttacttttcattcagcagtttggaaacactgtttctctagaatctgtgaaggtatatttgggagtgcattgaggtctatggtgaaaaataaattatcttaagataaagccagaaagaagctttctgagaatttactttgtgatgtgtgcctttatctcacagagttaaaccttttattcagaagtttggaaacactgttttgtccattcagcaaatggacattttggagttctttgaggccaatggtgaaaaaacgaatatcccaagatgaaaactagaaggaagctatctgaaaaactgctttgtgatgtgtgcaatcatctcacagagtgaaacgttgcttttcattcagcaggttcaaacaatatttttataaaaactagaaagatgtttctgagaaactgcttgacgtgtgctttcatctcacagagttatacctttcttttcattcagcagtttggaaacactgtttcggtttattctgtgaatggacttttgggagtgcattgaggccaatggagataaagggaatatcccaggataaaaactggaggaaactaactgagaaactgttttgtgagatgtgcatccatctcatagaggtaaacgtttgttttcattcagcattttggaaacactgttattttagaatctgtgaagggatatttggtagtgcattgaggcctagggtgaaaaagaaaatatgttgagataaaaacgggaaagaagctttctgaaaaaattctcagtggagtgtgctatcaactcagaatcaaacatttcttttcattcaacagtttggaaacactgctttttttttacaatctgcgaatggacatttgggagctcattgaagccgacagcgaaaaagcgaatattccaggataaaaactagaaggaagatgtctgagaaacagctttgtgaggtgtgcattaatctctcaagttaaactgttctttacattctgcagtttggaaacactgtttttgtagaatctgcaaagggatatttgggagggcattgaggcttatagtgaaaaagaaaataacttcatatgaaatctagaaagaagctttctgagaaactactttgtgaagtgtgtattcatctcacaaagttaaacctttcttttgattcagcagtttggaaaaatgttttgtagcatatgtgaagcgatatttgggagcacattgagtcttatgatgaaaaagaaaatatcttcatgtaaaaactagaaacaatctttctgagaaacttctttgagatgtgtgcattcatctcacagatttaaaactttcttttgactccacagtttggagtcactgttttctagaaactgtgaagggatattagggaatgaattgaggccaatggtgaaaaagtgaatatcccaggttaaaaactagaaggaaactaactgagaaacctcactgtgatgtgtgcattcatctcacagagtgaaatcttaatttttattcagcagtttggaaacactgtttttgtagaatctgcagtgtaatattttggagcacattgaggcctaaggtgaaaaagaaaatatcttcagataagaactagaaagaagcttttggagaaactgatttgtgatgtgtactttcatctaacagagttcaacttttgttttattcagcagtgtggaaaccctgtttttgtccattctgtgaatggacatgtgggagctcacagaggctgacagtgaaaaagggaatatcccaggataaaaactagagggaagttatctgagaaaccactttgtgatgtgtgcattcatctcacagagttaaactttcttttcattctgcattttggaaacaatgtttctgtagaatctgcgaggtgatatttgggaccatattgaggcctatggtgaaaaagaaaatatctccagataaaaactagaaagaaactttctgagaaatttctttgtgatgtgcgcattcatctcaaagaggtaaacctttcttttgtttcagcagtttggaaacactgtttttgtccattctgtgaattgatatttgggagatcattgaggccaatggcagaaaaacaaatatcgcaggataaaaattagaagaaagctatctgagaaaccgatttttgatgtgtgcattcatctcacagttaaacttttcttttcattgaacaattgggaaacactgtttttttataatctgtgaaattatgtttgtgagtgcattgaagcctaaggctaaaaagcaactataacaggataaaaactagaaggaaactttttgagaaactgctttgtgatgtgtgcattcatctcacagagataaccttacttttgattaagtagtttggaaatactttttttttttttttttttgagacggagtctcgctctgtcgcccaggctggagtgcagtggcgggatctcggctcacttcaagctccgcctcccgggttcacgccattctcctgcctcagcctcccaagtagctgggactacaggcgcccgccactacacctggctaattttttgtatttttagtagagacggggtttcaccgttttagccgggatggtcttgatctcctgaccttgtgatctgccagcctcggcctcccaaagtgctgggattacaggcgtgagccaccgcgcccggccggaaatactttttttgtccatgctgcaaatggacatgagagctcattgagtccaatggcaaaaaagcaaatatcccaggataaaaaccagaaggaagctatctgagaaaccgctttgtgatgtatgcattcatctcacagacttaaacctttcttttcattcagcagtttggaaacaaggatttggtagaatctgcaaagggatattttggagcacattgagtcctatagtgaaaaagaaaatgtcttcagataaaaactagaaagaagatttctgagaaactgctttgtgatgtgtgcattcttcacacagaggtaaacttttcttttgattcagcagtttggaaacactgtttttgtccattctgtgaactgacattttggagctcatggaggccaatggtgaaaaagagaataccccaggataaaaactagaaggaagctacctgagaaatcgttttgtgatgtgtgcattcatctcacagagttaaagcattctgttaattcaacagtttgtaaacactgtttttgtagaatccgcgaagggatatttggaagcacattgaggactattgtgaaaatgaaattatcttcagataaaaactagaaagaagcattgagagaaactgctttgtgacttgtacattcattttacagagttaaaatttcttttcattcagcagtttggaagcactgtttttgtccattctctgaatggacttttgggaggtcattgaggccaatggcaaaaaagtgattactccaggataaaaactagaaggaagctatctgagaaatggcttagtggtgtgtgtattcaactcacaaagttaaatctctcttttgattcagcagtttggaaacactggttttgtagaatctgcaaaaggatatttggagcacattgaggcctatagtgaaaaagaaaatatattcagataaaaactagaaagaatctttctgagaaactgctttgtgatgtgtgcattcatcttacagaattaaacttttcttttgattcagcagtttggaaacactgtttttgtagaatatgtgaagggatatttgggagcttgttggtgcgaatggtgaaaaagtgaatatcccaagataaaaactagaaggaagctatctgagaaacccctttgtaatatatacattcatctcatagactaaatcttttttttacttagcagtttggaaagactgcttttgtacaatctgtgaagggacatttggaaatgcattgagccctatagtgagaaagaaaatatcttcaggttaaaagttgaaggaagctttctgagaaactgctttgtgatgtgtccattcatctcacagagttaaatctttcttttaattcagctgtttggaaagactgtttttgtagaatctatgaagggatatttgggagagctttgaggcctatggtgaaaataaaataatcaaataaaaactagaaagaagctttctgagaaactgctttgtgatgtgtccattcatctcacagaatgaaacctttcttttggttgaagagtttggaaacactgtttttgtccattctgaggatggacatttgggagctcactgaggacaatggaaaaaaaggaaatgtcccaggataaaacctggaaggaatctatctgagaaaccactttgtgatgtgtgcattaatctctcagagataaactgcccttttaattcagcagtttgggaacactgttttgggagaatctgaaaaggagcttttgagagcactttgaggcctatggtgaaaaagaaaatatcttcagataaaaactagaaagaaactttctgagaaactgctttgtgatgtgtacattcatctcacagagttaaaactttcttttcattcagcattttgggaagtatgtttttgtccattctgcaaaaggacatttgggagctcattcagaccaatggcaaaaaagaaaatatcccaggataaaaactagaaggaagctgagaatccatttgtgatgtgcgcattcatctcacagagtgaaaattttcttttgatacatcagtttggaaacatggtttttgtagaacctgtgaagggatatttgggagcacattgaagcctaagttaaaaaagaaaacatattcagataaaaactagaaagaaccattctgagaaactagtttgtgatgcatgccttcatctcacagtgttaaacgtttcttttgattcaacagtttggaaatgctgtttttgtagagtttgtgaagggatatttgggagctcattgaggcatctggtgaaaagaaaatatcttcagataaaaacctgaaagaagctttgtgatgtatgcattcatctcatagagttacacttttttttctgatttaacagtttggaaatgctgtttatgtacaatctgcgaagggataatttagagcacattgaagccagagatgaaaaagaaaatattttcagataacaaccagaaagaagctttctgattaactgctttgtgatgtgtgcattcatctcacagagttaaacctttcttttgattcatcagttttgaaacactgttttttcccactctgcgaacagacatttgggagctattgaggccaatgacgaaaaagtgaatttcccaggataaaaaaaagaaggaatctactggagaaaccccttcatcatgtttgcattcacttcgtagagtgaatccattcttttgattcatcagtttttaaatactgtttttgtagaatatgagaagggatatttggaagcactttgaagcctatggtcaaaaagaaaatatcttcagataaaaactagaaagaatatttctgagaaactgctttgtgatgtatgcataaatatcacagagttaaacttttcattcagcagtttggaaaaattgtttttgtctattctctgaatggacacatgggaggtgattgaagccaaaggcgaaaaacaaatatcccaggaaaaaaactagaaggaagctatctggcaaacagctttgtcatgtgtgaattcatctggtagagtgaaacctttattttcattcagcagtttggaaacactgtttttgtaggatcagcaaagggatattttggagtgtattggggcctatggtgaaaaaaaaaccttcagataaaaactagaaagaaactttctgagaaactttttgatgtatgcattcaactcacaaagataaaactttctaatgattcagcactttggaaacactgtttttgtccattctgtgaatagatatttgggagctcattgaggtcaactgtgaaaaagtgaataacccaggttagaaatagatggaagctatctgagaaacccctttttgatgctcccattcgtctcgtgcattaaaccattcttttcattcagcagtttggaaacactgtttttgtagaatctgtgaagaaatatttgggagcgcattgaggccaattgtgaaaaagaacattacttcagataaaaactagaaagaagccttctgagaaactgcttagtgatgtgtgcattcatctcacagtgttaaaccttttttttgattcagcagtttggaaccactgttttttcttccattccgcaaatggacatttgggagctcactgagacaagagtgaaaaaacaaatattccaggataaaaactaaaaggaagctatctgagaaactgctttgtgatgtgtgctttcatctcacagacttaaacgtttcttctcattcagcagttttgaaacactgtttttgtagaatctgtgaagggatatttttgggtgctttgaggcctatggtgaaaaagaaataatcctgagataaatctagaaagaagctttctgagaaactgttttgtgatgtgtgcattcatctcacacagttcaaccttcctttttattcagaagtatggaaaaactatttttgtccattctgcaaatgaacatttgtgagctcattgaggcccatggcaacaaagtgaatatcccaggaaaaaaaggagaaggaaggtatctgagaaactgcttttggatgtgtgtattcatctcacaaaattaaacttttcttttcattcagcagtgtataaacactgtttttgtagaatctgtgaatggatatttgggagtgcattgaggcctgcggtgaaaaagaatatatcttcagatacaatctagaaagaagctttctgagaaacttctttgtgatgtgtgcatttttctcagagagttaaacctttcttttgcttcagtagtttggaaacactgtttttgtccactctgctaatggacatttgggatctcattgaggtcaatggtgaaaaacgaatatcccaggataaaaactagaaggaagctatctgagaaactgctttgtgatgtgtgcattcatctcacagattgaaacctttctcttcattcagcagtttggaaacactgtttttgtagaatctaaaaagagatatttaggagcgcattgagttaaaccattcttttgattcagcagttttgaaacagtgttttttgctttctgtgaatggacatttggaagctcattgaggacagtagagaaaaaagggaatattccagtttaaaaactggaaggaagctatctgagaaacctctttgtgatgtgtgtattcatcttgcaaagataaatggttcttttcattcagcagttttgaagcactgttttttgtagaatctgaaaacagatatttgggagtgcattgaggcctgtggtggaaaagaaaatatttgggagtgcatagaggcctatggtgagaatggaaatatctcccaataaaaactaaaatgaaggtttcttagacactgctttgtgatgtgtgcatgcatgtcacagagttaaaactttcttttgattgagcagtttggaaaccctgtttttatagaatctgtgattggatatttgggagtgcattgaggcctatggtgagaatggaaatatctcccgataaaaactaaaatgaagctttctgagacactgctttgtgatgtgtgcattcatgtcacagagttaaagctttcttttgattgagcagtttggaaaccctgtttttatagaatctgcaatcagatatttgggagtgcattgaggcctatggcaaaaaatgaaatatcttcagataaaaactagaaaaaagcttttttcagatactcctttttaatgtatgcgttcatctcacagaggtaaaccttacttttgattgaggagtttggaaacactgttttggtagaatctgggaagggatacttgggaatgcattgaggtctatggtgagaaaagaaatatctccaggttaaaactagaaagaagctttctgagaaactgcttcatttgtctacattcacctcatagagttaaatctttcttttgattgagaagtttggaaaaattctttttgtacaatttgtgaagggatattaggaagcacattgaggcctttggggaaaaaggaaatatcttaagagaaaaactagaaagaagctttctgagaaactgctttgtgatgtgtgcattcatctcacagagttaaacgtttattttgattgagcagtttggaaatattgtttttgtagaatctgcgaagggatattttgtgagtgcaataaggcctatggtaaaaaagcaaatatcttcagagaaaaaatagaaagaagctttctgagaaactgctgtgtgatgtgtatgttcatcacacagagtaaaaaatgtctttttattgagcattttggaaacactctttttttagaatatgtgaagggatattttggagtgcatttaggcctatgattaaataggaaatatcattacagaaaaactagaaagaagctttctgagaatctcttggtgatgtgtgcattcatcacacagagttaaacatgtcttttgactgagcaatttggcaacactgtttggagaatctgtgaaaggatagttgggagtgcattgaggtctatggtgaaaaaggaaataccttcagagaaaaactaggaagatttctcagaaactgctttgtgatgtgtgcattcatctcacatattaaatctttttttttttgattggacagtttggaaacattgtttttgtagaatccacgaagtgttattagggagagcattgaggcctatggtgaaaaacgaaatatcttaagataaatactagaaaaaagatttctgaccaacagtttgtgatatgtgtatttgtctcacagagttaaacctttcttttggttgagcagtttggaaatattgtttttgtacaatctgcaaagggatatttggaagcactttgaagccaatggtgaaaaatgatatatcttcagagaaaaactacaaagaagctttctgaaaaactactttgtgatgtgtagattcatctcacagagttaaaccttgcttttgattgagcatttggaaacactgtttttgtagaatctgcgaagggatatttgggagtgcattgaggcctatggtgagaaaggaaatatcttcagacaaaaaatagaaagaagatttctgagaaattgctttgtgatgtgtgcattcatcacacagagttaatcatgtcttttgattgagtattttggaaacactctttttgtagaatctgtgaacaaatatttgggagcacatggaggccaaagatgaaaagggaaatatcatcagaggaaaaactagaaagaagctgtctgagaaactacttggtgatgtgtgcattcatcacacagagttaaacatttcttttgattgaacagtttggaaactctctttggcagggaattgaagcctaaggtgttaggatatttggcagggaattgagtcttaaggtgaaaaagtaaataccatcagataaaaactaaaaagaagatttctgagaaactgctccatgatttgtgcattcatctcaaaaagttaatgtttcttttgattgaaccatttggaaacactgtttttgtagaatctgctaaggaacatttaggagttcattgaggcctatggtgaaaatggaaatatcttcagagaaaaactagaaagaagcttcctgagaaactgctttgtgatgtgtgcatttacttcacagaattaaaccttacttttgattgagcagtttggaaacactgtttttgtagaatgtgtgaagggatatttgggagcactttgaggcctatggtgagaaaggaaatatcttcagataaaaactagaaggaagctttctgagaaactgctttgtgatgtgtgcatttacttcagagagctaaaccttactttttattgagctgtttggaaacacttttgtagatgtgtgaagggatatttgggagtgcattgaggcctatggtgagaaaggaaatatcttcagataaaaactagaaagaagctttctgagaaactgctatgtgaagagtgcattcatctcacagagttacaactatattttgattaagcagtttggcaacagtttttttgtagaatgttagacgggatatttgggattgctttgaggactatgatgaaaagggagatatcttcagataaaaactaaaaaagaaacattctgggcaactcttttatgatgagtccattcatctcacagcgttaaacctttcttttcattgagcagtttggggagagtgtttttgtagaatcccagaagcgatatttgagagcgctttgatgcctatagtgaaaaacttaatatcttcagataaaaactagaaagaaggtttctgggaaactgctttgtgatgtgtgcattcatctcacagagttaaacctttcttttgattgagcattttggaaacactgttcttgtagaatctgcaaatggacatttgggagggcattgaggctgattgtgaaaaacaaattatcttcagataaaaactagaaagaaaatttttgggaaactgctttgtgatgtgtgcatccatctcacagagttaaaccattcttttgattgagcattttggaaacactgttcttgtagaatctgcaaatggacatttgggagggctttgaggccagttgtgaaaaacaaattatcttcagataaaaactagaaagaaagtttttgggaaactgctttgtgatgtgtgcattcatctcacagttaaaccattcttttgattgagcagcttggaaacactgctttagtagaatctgtgaagggatatatgggagtgctttgaggtttatggtgaaaaaggaaatatcttcagataaaaactagaaagaagcattctcagaaactgctttgtgatgtgtgcattcttcccacagagataaaactttcttttgattgagaagtctggaaacactgtcttggtagaatctacgaagggatatataggagcacctggaggcctatgatgaaaaaggaaatatcttcagagaaaaactagaaagaagctttctgagaaactgctctgtgatgtgggcattcatctcacagaggtaaacctttcttttgattgagcagtttgaaaacattgttttggtagaatctgggaagggatatttgggatcgcatagaggcctatttgtctatgggtcacatggagtctaaacagcatgtttatttctgctatattaaactcctgttaaaacagggtggtgtctgagtaaccacggaaaatacggccactctaatcaacatggtggaaaaacattgtccttggtttcctgaaaaaggaaacttagatgtagaagtatgggatcctgttgctgcaacattctgtgaactggtctccacagggaattatgttcctgtcactgtttggggtgattgggccttggcacatgccatcctgatgacataccaatcctgtgaccctctacagttaccacaattttatgaatctgatgacactccacctcttcctcaaccttcctctcctgcacagccttcgttatctgatcaccctctcccttcagctactccttcccccaactgtcgatgttgagaattcaatgtctaattccagtgactttggattacagtcaccccctgatgatcttatttctttccatgaagagctggtgcttgtagctcctgtggccccgattcacacagcccaggaccatatacatgctaattcttttcttttcaaacctacagagtcacctaatcgctctgggaccaaactaccatttacctataattctttaggccctcccccatccacttcaggccctcactctcctgtcatttcagttcctcaactggtcaccttgccatccactcagcctgcttctctttatccttcttcacatatggatgcccgtaatcaccagtatacttctgctccttctgctcccctaatgcccctttctcacactctcattctggtccgaccccctcaccctcagtttccctgatctacacatgtttttcctgtcacttctatgccgactccatctcagatgcctactctggaaacttcaatgcaatgcttattatgccaaaacaaagaaacaaatatattagatatgtggacttatctggtcgtgttagaccctcctaccttctaaggggtacaaatgcatcgttatgtacctcttaatcttacctttttaaaagaatttaaggatgcttgtactcagtatggtcctacttctccttatgttaaaatggtattacaaactttttgtattgaggtcattttgcttcctttagactgggacattttgtcaaaagctgttttaaccccatctcagcatttacaatttcgtatctggtggtcagaagaggcccattggcaggctcagctaaatcagactaatagcattctaattactcacgctcagctcacaggctccaatagtttctccgatgctcatgcccaattaaactttgatgttcttaccacagaaaaagtaacaaaggtgtgtatgatatctttggatacattatgcacttcaggccaagctcctgtttcttttaccacagttaaacaaggtaactctgaattatacactgattttttagcaaaattagaagatgctgttcaaaattatttctctgatgagcatgctcaaggtattctcctttgtatgttagattttgaaaatgcaaaccatgagtgtaaaatggccatgtgttctgtccaatgacaaaatttacctgatcacgaggtgttgcctgtatatattaaaggtagtgaagacactggatcagacacccacaaagctattctctgggcatgggccatggtggacaccaactaaactggtcccactaattattttcttggagtctgctataattgtggttaacttggtcatactcaaaaaaattgcactgtttaaagcctccaagctggatcaacaaacacagccaaatgctgctgctactgtttgcccacgttgtcgcaaaggtaaacattgggcaagtaattgccactctaagtatgatatagatggaaacctcctgccaaaacaccagggaaatggggactggggccaattctaggccctaatatcaaatgggatacttcagactcagatcaatgttgggtttccacttcaggcagtctcaacacagcccccattacaaacaaatttacctacagccaacccaaattagtccaagcctctccttctctctcagtacaatgcttgtccacctccacagtagggggtggggcagtcgatctctctagtactattcctttaaatttactacctaactctttgcctttaattgttcccacgggggtcactggccctttatctcgaggtttggtaggcctggtgttagatagggcatccacctctggtaaaggaatgaccattcgtaatggtctcattaattctgattccattgatgagattaaattaatcatgtctgccaaggttcctgtttccattctggctggtgagtcaattgctcaattgcttttactacctaatatcgttttaaacaaaggaggtaagacacatggccctggaattggctcttctggtgaaaagcctgatattggattattataatttctaaacaatggctcacctgcacaatacacattcaaggaaataagtttaagggactagtagatactggggctgatgtttctgttatttcctctactttacagccttcctcctggcttaaacatcctgccaacatggcactagtaggtgttggaaatgccaaggaagcttatgagagcacatttatcttgccttgcactggccctgattgtcaaaagggtacaattcggctttttatcacaccaatccccattaatctttggggtagagatttactggcacattggggggctgaaattaatattccacatgactcttatagtgcttccagtcagcatatgatggaaaacatgggatttgttcctggacttggtctcagtccaaaacgtgaagggattactaaacccctcccagttactgtaaaagaaaacagggctggtttaggttatccctatttatggtggccgctgtcacacctcctgatcctatctctttacaatggaaatctgacacacccctttggattcaacagtggctgctttctaaaaaataactggaggctttatctcacttggtttctgaacagttacaacttggaaatgtggaactttctctttcctcctggaattctcctgtgtttctagtaaaaacgacatcaggcaagtggctgatggtaaccaatttaagagtcattagctctgcaattaaatctatggtggcaatccaacctggcatgcctgcccctgatttaatacctttaataattagaacagcttttgccaaaaggtcccagtctaaaggaaacaaaatgacctcagtacaaaaagtttgtaataccattttaacataaggagaagtaggaccatactgagtacaatttacctataattcttcaggccctcccccgtccatttcagcccctcatcctcctgtcatttcggttcctcaactggtcactttgccatccactcagcctgcttttctttacccttcttcacatatggacacccataatcaccagtatatttctgctccttctgctcccccaatgcccctttctcacactctcattctggtccgaccccctcaccctcagtttccctatctacacatgcttttcctgtcacttctctgctgactccatctcaaatgcctactctggaaacttcaatgcaacgcttattacaccaaaacaaagaaacaagtaaattagatgtgtggacttatctggtcactctaataattcctcagggaatactaaatagccctacaatctgcccattttatgttgggcaagttctttcaccagttcaagcccaattttcccaggcctatattcttcattatattgatgatattttaattgctgcccacactgataaagaattaattgactattttcaaagtttgagccaccatgttacagaggctggattacacatcactcaggataaaattcaacagaccacttctgttcaatatttaggaatagtggtcaaaagacaacatattcaaccttaaaaagttgaaattaggagagactctttgaaaactttaaatgacttccaaaaagttttgggtaacattaattatgtaagacctactttaggcattacaacctatgcactgtctaaattgttttctatgctgcagggaaagtccaatctctgcagtctcagaactttgacccctgaggcttcaccagaactggaattcgtagaggaaagaatccaaaccactcagttatctagagtacagccatttcagccttttcaggttctggtttttgcttcattacactctcctactgtactaatagttcaacataatgatttagtggagtggtattttcttcctcattctgtgtcaaaaactttctctgtttatctagatcaaatggccactctaattggacaggcactgtgtagaatacttaaaatttctggatttgatccaaatttaattgtagttcctttaaatcggctcgaagttcaggccacctttcaacattctgtaccgtggcaaattcacttggctgattttattgccattattgacaatcattaccagaagaacaaattgtttgattttataaaaatgacatcttgggtggtccattgattaaccaaagatcagccctttcctgaggcctttacactgtgcagtgatggctccagtaatggcaatgctgattatgtaggtcctacagacaagcttatttgtaccccttacacctctgatcaaaaggcagagttaattactgtcattactgccttgaaggatttccccaaactgggaaatcttctttcaatagcaaataggagaaatatctttttgccttgtgacatttccccaaacctttaaatattgtctctgtatcttcatgtgatctctgtgacccacaccctattagtacactccctccccttttgaaaatcactaataaaaacttggtggttttgtggcttgcacggcatcaaggaacctgccgaaatgtgataactcccccagatacccagctttataatttctctcttttgtactctttccctttatttctcagactggctgacacttagggaaatagaaaagaacctacatgaaataaagttgaattatcaaggacgggttccccgataattttcattcatcagtttggaaacactgtttttgtaggatctgtgaagggatatttggcagcacattaaggcctatgttgaaaaagaaaatatcttcatacaaaaactagaaagaagctttcttagaaactgctttttgatgtgtgcattcatcccacagtgttaaacctttcttttgattcagtaatttgaaaaaactgcttttgtggattctgcaaatggacatctgggatttcattgagggcaatggtgaaaaagtgaatatatcaggagaaaaactagaaggaagctgtctgagaaattgctttgtgatgagtgcattcatcttgaagagttaaaccattcttttcattcagtagttgggaaacactgtttttttagaatcagtgaaggaatatttgggagcgcattgaggcctacagtgaaaaaatcttcagataaaaactagaaagaagagatctgaaaaactgctttgttatgtgtccatttatttaacagagtgaaacctttcttttgattcagcagtttggtaacactgtttttggcgattctgcgaatggacatttaggaactcattgaggccaatgatggaaaagtgaatatcccagaataaaaaccagaaggaaactatctgagaaaccactttgtgatatgtgcattcattttgcagagtgcaaccattcttttcattaagtggtttggaaacactgtttttgtagggtctgcgaagggatatttgggaacgcattgaggcccatggcaaacagaagatatcttcagataaaaagttgaatggaactttcagagaaactgtttgtgatgtgtacattcatctcacagagttaaacctttcttttgattcagcagtttggaaccactgctttggtccattctgcaagtggacatttgggagctcattgaggccaatgacaaaaaagtgaatatctcaggagaaaaactagaaggaagctatctgagaaaccactttgtgatgtgtgcattcatctcacagaattaaaggcttcttttaattcggcagtttgcagacactgtttttataggatttgtgaagtgatattttagaatgcatagaggcctatggtgaaaaggaaaatatcttcagatacaaaatagaaagaatctttctgagaaactgctttatgatgtgtgcattcatctcacagagataaactttcttttcattcagcagattggaaacgctgcttttgtagaatctgcaaactgatatttgggagctcattgaggcctatgctgaaaaagaatctatcttcatataaaagctagaaagaagctttctgagaaagggtttgtgatgtgtgcattcatcacacagagtttaacatttgttttgattcaggaatttggaaacactgtttttctccattctgcaaacagacatttgggagctcattgacgacaatggcaaaaaagtgaatatcccaggataaaaacaagaagaagctatctgaaaaaccgccttgtgatgtatacattcatctcacagaattaagcatttctattcattcagcagtttggaaaaactgcttttgtagaatctgtgatgggatatttgggagtgtttgagatctatggtgaaaaagaaaatatcttcataaaaaactagaaagaatcttttggagaagattgccacatgtgcattcatctcacatagttaaaactttcctttgattcagagttttggaaacactgtttttgtagaatctgtgaagggatatttgggagtgcattgaggtctatgttgaaaatgaatatatcttcagataaaaactagcaggaagcattctttaaactgttttgtgatgtgtgctttcatctctcatagttaatcctttctttctatttagcagtttggataaactgtttttgtccattctgcgaatgcacatttgtgagctcattgaggccagtggtgaaaaagtgaatatcccagcataaaaactagaaggaagctatctgagaaacctctttgtgacgtgtgtattcgtctcacagatataaacctgctttttcattcggcattttggaaacactgtttttgtagaacctgcaaagggatatttgagaatgcattgtctatggtgaaaaagaaaatgtcttcagataaaaactgaaaatgtttctgagaaactgctttgtgatgtgtgccttcatctcacagagtaaccatttcttttaattcagcagtttggaaaaactgtttttgtccattctgtgaatggacatttgggagcacattgagaccaatggagaaaaagtgaatattccaggataaagactagaaggaagctatctgaaaaatcactttgtcatgtgtgcattcatctcacagagataaaccattcttttcattaagcagcttggaatatccatttttgtagaatcagcaaagggatagttgggaggccatttatgccaaaagtgagaaagcgaatatcccaagataacttttagatggaagctgtctgagaaacccccttgtaatatgtgcattcatttcacaaggttaaacttttcttttcgttcagcagtttggaaacactgttttcatagaagctgcgaaggggtattttgaattgcattgaggcctagggtgaaaaagaaaatatcttgagagaaaaactagaaagatgctttctgagaaactgtcttgtgaggtctccatttatctaacagaatgaaagctgtcatttgattcagcagtttggaaactctgtttttgtccattttccgaatggacatttgggagctcattgaagacaatggcgaaaaagcaagtatccctggatgaaaactagaacaaagctatctgagaaattgctttgagatgtttgcattcaggtagcagagtgaaatattacttttcaatcagcagtttggaaacactatttgggagcgaattgaggcctgtggtgaaaaagaaattattttcagataaatacggaaaagaagctttcttggaaactgctttgtgatgtgtgctttcatctcacacagttaatcctttcttttcattcagcagtttgggaacactgtttttgtagaatctgtgaagggatatttgggagcaacttgaggcctatgggaaaaacaaaatatcttcagatatgaactagaaagaagatttctgagaaactgctttgtgatgtgtgcattcatcccacagagttaaacttttgttttcattcagcagcttggaaacactgtttttgtccattttgtgaatggatgttttggagctcattgaggtcaatggcaaaaaagcaagtatgccaggataaaaactacaaggaagcaatctgagaaactgctttgtgatgtgtgcattcatctcacatagttaaacttttctttttattcagaaatttggaatcactgtttttgtagaatctgcaaagggatatttgggagtacattgaggcctatagtgaaaaataaaatatcttcagagaaaaacaagaaagaaactttctgagaaactactttcaggtgtgtacattcatctcacagagttaaaacttttatttgattgagcagtttggaaacactgttttggaagtattgcaaaggtttatttgggagccaattgaagcctatagtgaaaaatgaagtacctttaaataaaaactagaaaaaagctttctcagaaactgctttgtgatgtgagcactcttctcacagtgttaaacctttcttttgattgagcagtttggagacactgttttggtggaatctgcgaagggatatttggaagcactttgaggcctatgatgaaaaaaggaaatatctacagataaaaactagaaagaagctttctgggaaacttatttgccatgtgtgcattcatcttacagagttaaacctttcttttgattgagcaatttggaaacactgtttttgtagaatctgctgagggatatttgggagcgctttgagggcaatggtgaaaaaggaaatatcttcagataaaaactagaaagaagctttctcagaaatcgttttgtagggtgtgcattcttctcacagagttaaacgtttgtgttgattgagcagtttggaaatactgttcttgtagaatctgcgatgggatatatgggagcacattgtggcctatgttgaaaaatgaaatatcttcagagaaaaactagaaagaaaccttctgagaaacagcattgttatgtgtttatttttctaacagatttaaacttttctattgattgagcagtctggaaacactgttttttttagaacctaagcagggatatatgggagagcattgaggcctatggtgaaaaagtaaatatcttctgagaaaaactgaaaagaagctatctgagaaatggctttttgatgtgtgcattcatctcacagagttaaatctttcttttgattgagcagtttggaaacactgttttggtagaatctgcgaagggaaatttgggagcactttcaggcctatggtgaaaaaggaaatatcttcagataaaaagtagaaagaagctttctgataaactgctgtgtgtagaatacattcacctcacagagttaaacttttgttttgattgggcagtttggcagcagtatttttgtagaatctcagaagagatattttgtagcactttgaggcctaaggtgaaaaatgaaatatcctcagattaaaactagaaagaagctttctgaggaaactgctttgtgatgtgtgtattaatctcacagagttaagcctttcttttgagtgagcagtgtggaaaccttcttttggtagaatcaggaaagagatacttgggagcgcatttaggcatatgatgaaaaagaaaatatctttagataaaaaccagaaagaaggtgtctcggcaactgctttgtgatgcaaacattcctccacagagttacaccttgcttttcattgagcaatttggtgacactgttttggaagtaactgcgtagggatattttggagtgcactgaggcctatggtgaaaaaggaaatatcttcagataaaaatttgaaagaagctttctcagaaactgctcggtgatgtgtgcattcttctcaaagagttaagccctacttttgattgagcagtttggaaacactgttttggtagaatctgtgaggggatattagggagcgctttgaggccaatggtgaaaaagcaaatatcatcagaagaaaactagaaagaagcattctgggaaactgctttgtgaggtttgcattcatctcacagagataaacctttcttttgattgagcagtttggaaacactgttgttgtagaatctgcagagggttatttgggagcccatttaagcatatgttgcaaaaggaaatatcttcagataaaaactggaaataagctttctcagaaactattttgtgatgtgtgcattcttctcacagagttataccttccttttgagtgagaagtttgtaaatactgtttttgtagtatctgaaaatggatatatcagagcagattgaggcacagagtgaaaaaggaaatatcttcacagaaaacaagaaagaagctttctgagaaacaacttcataatgtgtaaattcttctaacagggttaaaactttcttttgatggagcagtctggaaacactgttttggtagaatccactgagggatatatgggagggcattgatgcctatggtgaaaaaggaaatatcttcagagaaaaattagaatagaagctttcagagaaattactttgtgatgtgtgcattcatctcacagagttaaacctttcttttgattgagcagattggaaacaatgttttggtagaatcagtgaagggatattttggagtgtattgaggcctatggtgtaaaaggaaatatcttcagagaaaaagtacagggaagctttctgagaaactgctttgagatgagtgcattcttcacacagagtaaaacctttctttgattgggccacttggcaacagtgtttttgtagaatctgagaaaggatatttgggagcactttcaggcccatggtgaaaaacgaaatatcttcagataaaaactagaaagaaacattctgggaaactgccttgtggagtgtgccttcatctcacagagttaaccctttcatttgattgtgcagtgtggaaacactcttttgttagaaactgtgaagagatatttcggagcacattgaggcccatagagaaaaatgaaatatcttcagataaaaactagaaagaagctttctcagaaattgctttgtgatgtgtgcatccttctcacagcattaatcgtttcttttgattgagcagattggaaacactgtatgtgtagtatctgtgaagagatattttggagcacattgaggcctatggtgaaaaaggaaataccttcagattaaaactagaaagaagctttctcagaaaccactttgtgatgtatgcattcttctcacagagttaaacattccttttgatggagcagttcggaaatactgtttttgaagaatctgagaagggatatttcggagtgctttgcagcctatgttgaaaaagcaaatttcttcagatgaaaagtagaaagaagctttctgagaaactgtcatcttgggaatgagtgcaatcatctcacagagttagacctttttattgattgagcagtttggcaacaatctgcagttttaggcaatctgcagagggatatttgggatcgctttgaggcctatgctgaaaaaggaagtgtctttagaaaacaactagaaagaaactgtctgagaaactgctttgtgatgattgcattcatctcccagagttaaacctttctttcaattgagccgttttgaaacactgtttatgtggaatctgcgatgggacattttggagcgcttgtggcctgtggtgaaaaaggaaatatattcagataaaaactagaaagaaggttcctgagaaacagttttgtgatgactgcattcatctcacagagttaaactttcctttgattgggctgtttggcaacactgtttttgtagaacctgagaagggatatttgggacgatttgagacatatggtgaaaaaagaaacatcttcagataaaaaatagaaaaaaagatttccgggaaactgctttgcaatatgtacattcacctcacagagttaagcctttcttttgaatgagcagttgggaaacactggttttatagaatctctgaagggatatttgggagcactttgaagcctatggtgaaaaagtaattatcttcagaaaaaaactaaaaagaagctttctgagaaactgttttgtgatgactacatttttctcagagagttaaacctttcttttgattgagcaatttggaaacaatgtttttgtagaatctgcaaagggatattttggagctctttcatgccaatggtgaaaaaggaaacatcttcagataaaaagtagaaagaagttttctgagaatctactttgagatgagtgcattcatcacacagagttaaatctttctttgattgagcagtttggcaacagtgtttttgtagaatctaagggatatttgagagcattttgaggcctatggtgaaaaacagagtagcttcagataaaaactagaaagaagctttctgggaaactgctctgtgatgtgtgcattcatctcatagaattaaatccttctcttaattgagcagtgtggaaacacttttttgtagaatctgtgaagagacatttcagactgcattgaggcctatggtgaaaaaggaaaactagaaagaagctttcttagacacaactttgtgatatgaacattcttctcacagcattaaacttttcttttgactgagcatattggaaacactgtttttacagaatccacgaagagatatttgggagcacattgaggcctaaggtgaaaaaggaaatgtctcagatacaaactagaaagacgctttctaagaaactgtttattgatgtgtgcattcatctcacagagttaaacctttcctttgattgacgagtttggcaacactggctttatagaatctgcgaagggatatttgagagtgctttgaggcctatggtgaaaaatgaaatatcttcacagaaaactagaaagaagctttcagagaaactgctttggaatgagtgcattcatctcacagaattaaacctttcctttcattgaacagtttggcaacactgactttatagattcggcaaagggatgtttgggagcactttgaggcctatggtggaaaaggaaatatcttcagaaagaagctgtctgagaaactgccttgtgatgagagcattcatctcaaagagttaaacctttcttttgattgagcagtttggaaacactgtgttggtagtatctgcaaggggacattttggagtgctttaagtcctatgatgaaaaatgaaatatcttcagatatataatagaaagaagctttctcagaaaccgttttgtgatgtgtctattcttctcacatagttaaaccctttttttgattgagcagtttggaaacactgtattggaaatatctgtgaagggatatttgggagtgctttgaggcctatggtgaaaaaggaaatatcttcagataaaaaataggaagaaactttctgagaaactgctttgtgattaattcattcatctcacagagttaaacctttctttggattgagcagtttggcaacagtgtttttctagaatctaagaagggatattttgggatgctttgaggcttctggtgaataacgaaatatcttcagataaaaactagaaagaagctttctgagaaactgctttgtgatgagtgcattcttttcatggaattaaacctttcttttgattgaccagattggaaacattgtttttgtagaatctgcaaaggaatatttgggagctcttttaggtcaatggtgaaaaaggaaatatcttcagataaaaagtagaaagaagctttctcagaaactgctttgagataagagcattcttcacccagagttaaacctttctttgattgatcagtttggcaacagtgtttttgtaaaatctgagaagggatatttgggggcactttcaggcctatggtgaaaaacgaaatatctgcagataaaaactggaaagaaacattctgtgaagctgctttgtgaagtgtgcattcatctcacagagttaaacctttcttttgattgagcagtgtggaaacattgttttggtagaatttgtgaaaagatatttcggagcgcattgaggcttagggtgaaaaaggaaatgtcttcagataaaaactagaaagaaggtttcttagaaagcactttgtgacatgtgcattcttctcacagtgttaatcttttcttttgattgagcagattgaaaacactgtatttgaagtatctgtgaagagatatttgggagcatattgaggcctatgatgaaaaaggaaatatcttcagatacaaactagaaagaggctttctcagaaacatttttgtgacgtgtgcattcatctcacagagttaaacctttcttttaattgaggagtgtggaaatatttttgtgttgaatatgagaagagaaattttggagtgcttttaggcctatggtgaaaaaggaaatatcttcaaatgcaaactagaaagtagctttctgagaaactgctttggaatgagagcattcatctcatagagttaaacatttcttttgactgagcagtttggcaacactggctttatagtatctgcaaacggatattttggagtgctttgaggtctaaggagaaaaagggaatgtcttcagaaaaaactagaaacagcttttggagaaactgctttttgaagtgtgcattaatcacacagaatgaaaccttaatttgattgagtagtttgggaaaagtgttttcacagaatctgtgaaagggtatttgggagagactagggtgaaaaaggaactacattcacagaaaaactagaaagaagccttctgagaaactgctttgtgatgtgtacatacatctcacagagttaaacctctcttttgattaagcagtttgtccacagtgtgtttttagaatctgagaagggacagtaggaggcactttgaggcctatgatgaaaaatggaatatcttcagataaaaaatagaaagaagctttctgagaaactccttggaatgagtccattcgtctcacacagttaaacgtttcttttgattgagcagtttggcaacactggttttaaagaatctgtgaagggatatttgggagcgctttgaggcctatggtgaaaaagaaaatatcttcagaaaaaagtagaaagaaacgttctctgaaactgctttgtgatgagtgcattgttttcacagagttaaacctttcttttgattgagcagtttggaaacactgtttttgtagaatcttcgaaggtacattttggagcacattgaggcctatggtgagaaaggaaatatcttcagagaaaaactagaaagaagctttctcagaaaccgttttgtgatgtgttcattcttctcacagagttaaacttatcatttgattgagcagtttgcaaacactttgtataatattcaaagggactttttggagctcattgaggcctacagagaaaaaggaagtattttcagagaaaaaatagaagctttctgagaaactgctttgtgatgtgtgcaatcttctaacagagataatctttccttttgattgagcagtctggaaacactgcttttgtagaatcttcaaagagacatatgggagcgttttgaggcttacagcgaaaaaggaactatcttcttagaaatattagaaagaagctctctgagaaacagctttgtgatgtgtgcattcatctcacagagttaaaactttcttttgattgagcagtttggaaacactgttttggtagaatgtacgaagggatatttgggaaccctttcaggcctatggtgaaaaaggcaatttcttctaataaaaactagaaagaaattttctgagaaactgctttgtggtaagtacattcatctcacagagttaaacctttctttcttttgattgatcagtttggcaacagtgtttttatagaatctgtgaagggatatttgggaggcctttgaggcctatggtgaaaaatgaaatatcttcagataagaaatagaaagaagctttctgggaaactgcattgtgatgtctgcattcatctcacagacttaaacctttcttttgatgagcagtgtggaaacacgttttgatagaaactgcaaagagatattttggaacacttttaggcctattgtgaaaaaggcaataacttcagagaaaaactagcaagaagctttctcagaaaccgttgtgtgatgtctgcattcagctcagagtgttaaacccttcctttctttgagcagtttggaaacactatttagttagaatctgtgaagggatatttggaaatgcattgtggtatatagtgaaaaaggaaatatcttcggataataactagaagtcagttttttctgtaactgctttgtgataagtgcatttatctcacagagttaaacctttctgttgactaagcactttggaaacactgttttggtagaatctgtgaagggatagttggaagtgcattgtggcctgtggtgaaaaaggaaatatcttcagatcataactataaagaagctttctgggaaactgctttgtgatgagtgcattcatctcacagagttaaacatttctattcattgagaagtttggtaacagtgttttgtagaatcagagaagggatatttagaagcactttgaggcatatggtaaaaaacaaaatatctaaagatagaaactagaaataagctttctcagaaatggttttgtgatgtgagcattcatctcacagggttaaacctttctttggttgagcagcttggaaacactgttttggtaggttctgtgaagggatatttgggagtgcttccatggttatggtgaaaaagaaaatatcatcaggtaaaaactagaaagaagctttctgagaaactgttctgtgatgagtacactcttcacagagttaaacctttcttttgattgagcagtttgccaaaagtgtttctgtggaatctgagaaggaatattttggagccctttgaggcctatggtgaaaaatgaaatatcttcagataaaaactagaaagaaggtttctgggaaactgctttgtgatgtgtgcattcatctcaaagagttaaacttttcttttaattgagcagtgtggaaacactgtttttgtggaatctgtgaggagttattttggagtgcattgaggcctatggtgaaaaacgaagtatcttccaagaaaaactagaaagaagctttctcagaaatcgttttgtgatgtgtgcattcttctcacagagctaaacttttcttttgattgagcagattggaaaactttttttttttagaatctgagaagggttatatgagagtgcattgaggcctacggtgaaaaaggaaatatcttcagagtaaaactagaaagaatctttctaacatcctgctttgtgagatgtgcattcatctaacaaagttaaaactttcttttgattgagcagtctggaaacactgttttgtgcaatcttccaagggatatgagggagcacattgaggactatgatgaaaaaggaaatatcttcagataacaaatcgaaagaagcagtctgggaaactgctttgtgatgagagcattcatctcactgagttaatcctttcttttgattgagcagtgtggaaacactgtttttgaagaatctacgaagagatgtttgggggaacattgaggcctatagtgaaaaaggaaatatcctcagataaaaactagaaagaagctttctcagaaatggctttatgatgtgtgcattcttctcacagatttaaacttttcttttgatttagcagtttggaaacactgtttttgtagaatctgagaagagatattttggagcactttgaggcctaaggtgaaaaaggaaatctcttcagatgaaaattagaaagaagctttctgagaaactgccttggggtcatttcatttatctaacagagttaaaccatacttttgattgagcagtttggcaacacttgttttatagaatctgcaaaggatatttgagagtgcatttagccctatggtgaaaaaggaaatatcttcagataaaaactagaaagaagttttctgggaaacagctttgtgttgtgtgcattcatctctcagagttaaaaatttcttgttattgagcagtattgaaatattgaaacactgttttggaagtatctgtgaaggtatatttttgagtgcattgaggactatggtaagaaaggaactaccttcagataaaaactaaaagaaggtttctcagaaaccactttgtgatgtgtgctctgttctcaaagagttaaaccttatttttgattgagcgtttgaaaacactgttttggttgaatgtgttaagggatatttcggtgtgctttgaggcctatggtgaaaaaggaaatatcttcagataaaaattagaaagaatctttctaggaaactgctttgtcatgtgtgccttcatttcacagagttaaacctttcttttgatcaagcagtttggagaccctgtttttgtaaaatctgcagaggtgtatttgggagcaatttgaggcctatggtgaaaaagtaaatatcttcagataaaaaccgttttgtgatgtgtgcattcttctcacagagttaaatctttcttttcattgagcagtttggaaatactgtttattttagattctatgaagagatgtatgggagtactttgaggcctatggtgaagaaggaaatgtcatcagagaaaaactagaaagaagctttctgagaaactactttctgatgtgtgaattcatcctgcacaggtaaatttttcttttcattgagcagtttggaaacacggttttggtagaatctgtgaagggatatttggaagcgcattgtggcttatggtgaaaaaggaaatatcttcatataaaaactggaaagaagctttccaggaaactgctttgtgatgagtgcattcaactcacagagttcaacatttattttcattgagcaatttgggaacagtgtttttgtagaatctgagaagggatatgtggaagtactttgaggcatatggtgaaaaatgaaatatcttcagataaaatctagaaagaagctttctcagaaactgctttgtgatgtgagaattcatcccacagtgttaaacctttcctttgattaagcagtttggaagccctgttttggtagaatctgcgaagggatattttggagcactttctggcctatggtgaaaaaggaaatatcttcagataaaaactagaaagacactttcagagaaactgctttgtgatgtgtacactcctctcacacagctaaatcattcttttgattgagcagtttggcaacagtgtttttatagaatctgcaaagggatatttgggagtgatttgaggcctatggtaaaaaacaaaatattttcacataagaaccagaaggaatgtttctcagaaactgctttgtgaggcatgcattcatgtcacagagttaaacctttctattaattgagcagtgtagaaacactggttttatagaatctgtgaagagatatttgggagggcattgaggtctatggtgaaaaacgaagtatcttctgagaaaaattagaaaaacgctttctcagaaaccgctttgtgatgtgtgcattcttctaacacagttaaactttcttttgattgagcagattggaaactcagtttttgtagaatgtgagaatgtatatatgagagcaccttgagtcctagggtgaaaaataaactatcttcagagtaaaactagagggaaattttctgacatcctgctttgtgatgtgtgcattcatctcacagagttaaaacttccttttgattgagcagtctgaaaacactatttttgtacaatctgggaagggctatttggaagtgcattgagacctatggtgaaaaaggaagtatcttcagataaaaactagaaagaagctttctgataaactgctttgtgaaaagaaagctcaagctttcttttgcttgagcagtttggaaacaatgttttggcaggatctgcaaacagatatttggaattgcattgtgggctatggtgaaaaaggaaatatcttcagagaaaaactggaaagaaactttctgggaaactgctttgttatgtgtgcattcatctctctgtgttaaaacttcatttttattgagcagctttgcaacactgtttttgtagaatctgagaagggatattttgagtgctttgaggccaatggtgaaaaaggaaataacttcagacaaatactagaaagaagctttctcggaaactgctgtgtgatgtgtgcattcttctcacagagagcttaacctcgcttttgattgagcagtttggaaacacagtttttgtagaatctgtgaagagatatttggaaacacctcaaggactatggtgaaataggaaggaacttcagataaaattaggaagaagaattctgagaaactgctttgtgaggtgtacattcatcaaatacagttagaactgtcttttgattgagcagattgtaaacacggtttttgtagaatctgcaaaggtgtgtttgggagtgcattgaggcctatggtgaaaaaggaaatatcttcagataaaaactatacagaagctttctgagaatctgcttgatgatgagtgcattcttcttacagagttaaaactttcttttgattgagcagtttgacaacactgtttttgtagaaactgcaatgggacatttgggagagcattgaggcttacggtgaaaaaggaaatatcttcacataaatactagaaagaagaattctctgaaactgctttgtgatgagtgcattcttctcagagatttaaattattgttttgattgggcagtttggaaacactgtttgggtacaatctgagaagggatatttggagggcactgaggcctatggtgaaaaaggaaatattttcagacaaaaactagaaagaagctttctgggaaactgctttgtgatgtgtgaagtcttctcacagagtttaacttcacttttgattgagcagtttagaaacactatttttgtagaatctatgtaagcatatatgggagcacattgaggcctacattgaaaaaggaaatatcttcagagaaaaactttaaagaaacattctcagaaactgctttgtgatgttggcaatcatctcatggagtttaaacattcttttgattgagcagttgggaaacaatgtttttgtggaatctgagaagggttgtttgggaggggatagaggtctgtggtgaagaaggaaatatcttcagaaaaaaactagaaagaagcattctgggaaactgctttgtgatgtctgcattcatctcacagaactaaacttttcttttgattgcacagtttggaaacattcttttggtagaatctgcgaagggatatttgagaatgcattgaggcacacggtgaaaaaggaaatatcttcagataaaaattaggaagaagctttctaagagactgctttgtgatgagtgcattcatctcaccaggttaaacctttctttagattgagcagtttggcaactgtgtttttatagaatctaagaagggatttttggaatgctttgaggcctagggtgaaaaacaaaacatcttcagataaaaactagaaagaagctttctgggaaactgctttgtgatgtgtgcattcatttctctgtgttaaaactttattttgattcagtagttttgaaacactgtttaggtagaatctgcaaagggatatatgggagcatattgaggtctattgtgaaaaaggaaataccttcagggaaaaaccagaaagaagctttctgaaaaacggctttgtgatatgtgtattcatcgcacaaaggtaaaactttcttttaattgagcagttttgaaacactcttttggaagtatctatgaagggatatttgggagtgtattgaggcctatggtgaaaaagtaaatatcttcggataaaaaatagaaagaagcattctgagaaactgctttctgatgagtgcattcatctcatagtgataaaactttcatttcattgagaagtttggcaacactgtttttgtagaatctgcctaaggatatttgggagcactttgaggcctatattcaaaaattaaatatcttcagaaaaaactagaaagaagctttctgagaaacttctttgtgatgagtgccttcttctcacagagttaaacctttcttttgatggaggagtttggaaacactgtttttgtagaatctgcgaaggggtattttggagtgcattggggcttatggtgaaaaagaaatatcttcagataaatactagaaagaagctttctcgaaactgttttatgatgtgtgcattcgacttacagtgttaaaacattctggtgattgagcagttggaaaacattgttttggaaaaatctgccaagggatatatttgggagcccattgaggcctattgtgaaaaaggaaatatcttcagattaaaactagaaataagctttctgagaatctgtttttctataagtgcaatcatctcacagagtgaaacctttcttttctttgagtggtttggcaaaagtgtttttgtagaatctgagaagggatatttgagatcaccttgaggcctatgttgaaaaaggaaatatcatcagataaaaagtagaaagaagctttatggtaaactgctttgtgatgtgtgcgtttatctcacagagttaaacttttcttttcattgagcagtttggaaacactgtttttgtagagtctgtgaagggatatttggaagtgcattttggtctatggtgaaaaaaggaaatatcctcagataaaaataagaaagaagctttctgggaaactactttgtgatgagtgcaattatctcacagagttaaacctttcttttcattgagcagtttgggaacagtgtttttgtagaacctgagaagggaaatttgggagcactttgaggcctatgtggaaaatgaaatatcttcagataaaatcaagaaagaagctttctgggaaactgctttgtgatgtgtgcattaatctcacagagttaaacttttcttttgattgagcagtttggaaacattgtattgttagaatctgtgaagggatattttggagtgcattgaggcctatgagaaaatgaaatatcttcagataagaactagaaagaggttttctcagaaactgctttagaaagtgtgcattcttttcactgagttaaacctttgttgtgattgagcagcctgaaaaccctgtttttttgtagaatctactaagggatatatgggagtgcattgaggcttatggtgaaaaagcaaatatcttcagagaaaaactagaaagaagctttctgggaaactgattcgtgatgtgtgcattcatctcaaagagttaaacctttcttttgatttaacagtttgacaacagtgtttttgtagaatatgagaagggatatttcggagtgctttgaggccaatggtgaaaaaggaaataacttcagatgaaaatgagaaagaaactttctgagaaactgcttggaaagagtgcattcatctcacagagttaaacccttcttttgattgaacagcttggcagcactggttttatagaatctgagaaaggatatttgggagtgctttgagacctatggtgaaaaaggaaatatcttcagaaaaagtagaaagaagctcttttacaaactgttttgtgataagtgcattcatctcaaagagttcaaactttcttttcattgagcagtttgggaacgttgtttttgcagaatctgcaaagggacatttgggagcacatttaggcctgtggtgaaagaggaaatatcttcagataaatactagaaagaagctttctcagaagttgttttgtgatatgtgcactcttcccacagagttaaatatttcttttgatttagcaatttggaaacactgtttttgtagaatctgttgcgggatgtatgggagtgcattgaggcctatggtgaaaaaggaaatatcttcagagcaaaactacaaagaaactttctgagaaactgctttgtggtgcatgctttcttctcacagaatttagactttcttctgattgagcagcctggaaacactctttttgtggaatctttgaaggaatatacgagagcgcatttagccctatggtgaaaaaggaaatatcttcagataaaaactggaaagaagctttcttagaaacttctttgtgatgtttgcattcttctgacagagttaaacctttcttttgatttaacagtctggaaacactgttttggtagaatctgtgaagggatatttgggatcgctttgaggcctatggtgaaaaaggaaatatcctcagagaaaaactagaaagaagctttctgggaaactgtgatgtgtgcagtcatcacatagagttaaacatttcttttgattgaacagtttagaaaaactattttggtagaatctacaaaggaatatatgggagcacagtgagatctatggtgaaaaaggaaatatcttcagatgaaaactggaagaagctttctgtaaagtgctttctgatgtgtgcattcatcacacagagttgaacctttcttttgattgagcagtttggaaacactgttcttgtagaatatgtgaagggatattttggaatgctatgaggcctacagtgaaaaaggaaatatctacagataaaaagtagaaagaagcttatcgagaaactgttttgtgatgggtgcattcatgtcacagaattaaacctttcttttgacagagcagtctggaaacactgtttttgtagaaaccacaaagagatatatgggagtacttagaggagaatggtgaaaaaggaaatatcttcagaaaaaactagaaagaaactttctgagaaaccacttttttatgagtatattcatgtcacagagctaaacctttcttttgattgagcagtttggaaacactatttttgtagaaactgtgaagggatacttggcagtgcatggaggcctatggtgaaaaatgaaatatcatcagataaacactagaaagaagctttctcagaaaccgttttgtgatgtgtgcactcttttcacagagctaaactttccttttgattgagcagtatggaaacactgtttttctaaaatatgcaaagggatatttgggagcacattgtggcctaagatgaaaaaggaaacaccttcagaaaaaacattgaaagaagttttctcagaaactgctttgtgatgtgtgcattctcctcacagagttaaaacttgcttttactgagcagtttggaaacattgttttgatagaatctgtgaagggacactttgaagtacattgtggcctatcgtgaaaaaggaaatatcttcagataaaaagtagaaagaaaccttctaggaaattgctttatgatgggtgcattcatctcacagagttaaacctttcttttcactgagcagtttgggtaccgtatttttgtagtatctggaaagggatatttgcgagtgctttgaggcctatggtgaaaaatgaaatatcttcagataaaatctagaaagaaaccttctgggaaactgcttcatgaaaagtgcattcatccaatagagttaaacctttcttttgattgaggagtttggaaacactgctttggtagaatctgcaaagggatatttgggagtgcatttaggcctatggtgtaaaagaaaatatcttcagacaaaaaccaggaagaagcattctcagaaacagctttgagatgttttcattcttctcacagagttaaacccttcttattattgagctgtttgcaaacactgtttttgcagaatctcagaagggttatttagaaatgctttgaggcctatggtggaaaaggaaatatctgcagaaaaaaactaaaaagaagctttctcagaaaccgctttgtgttgtgtgcattcttctaacagagttaaagctttcttacgattgaacagtttggaaacactgtttttgtagaatctctgaagggatacatatgggagtgcattgaggtctattgtgaaaacagaaatatcttcaaggaaaactaggaagaagctttctgaacaactgtttgtgatgtatgcattcatctctcaaagttaaacctttcttttgattgaaaagtttggagacactgttttggtagaatctacgaagggatctttgggagtttctcagaaacaaaaaagaaggtttctgagaaactgctttgtggtgactgcattaatctcacagggttaaaccttgcttttgattgatcagcttggcaatggtgtttttgtagaatctgtgaagggatatatgggatcactttgagagacctgtggtgaaaaatgaaatatctgcagataaaaactagaaagaagctttctgggaaattgctttttgatgtgtgcattcttctcacagagttaaaacttccttttgcttgagcagttttgtaacactgtttatgtgaaatctgcaaagggaaatttgggagtgcattgaggcttattttgaaaaaggaaataccttcagataaacactagaaagaagctttctcagaaaccactttgtgatgtgtgcattcttctcagagttatacctttcttttgattgagccgttttgaaacactgtttatgtgaaatctgcaaacggaaatttgggagagcattgaggcttatttcggaaaaggaaatatcttcagataaatactagaaagaagtgttctcagaagctgcatggcaatgtgtgcattcttatcagagcattaaacctttcttttgattgagcagtttggaaacactttttttgtagaatctgcgaagggatatttggcagtccattgaggactaaggtgaaaaaggaagtatcttcagataaaaactaaaaagaagctttctgagaagctgctgtgtgatgagtgtattcatctcacagatttttacctttcttttgactgagcagtttggagaccctgtttttgtaaaatctacaaagggctatatgaggctgcattgaggcttattgtgtaaaaggaaacatcttcagataaaaactagaaaggagcattttgggaaacaattttgtgatgtgtgcattcatctgacagagttgaaactttcttttgattgagcagttttgaaacactctttttgtagaatctgcaagtggatatttggagcgctttgcagcctatggtggaaaagcaaatatcttcacataaaaagtagacagaagcattctgagaaacttctttttgatgtgttcattcttctcacagagttaaacctttctttggattgagcagtctggaaacactgtttttaaagaatctatgaagtgatatatgggagcacattgaggcctagggtgaaaaaaggaatatattcagagaaaaattaggcagaattattctgaaaaactgctttgtgatatgtacattcttctcaaagagataaacctttctttttttgagcagtctggaaacactgtttttgtagaatctgtgaagggatatttaggatcacattgaggcctatgctgacaaaggaaatagcctcagataaaaatagaaagtagccctctcagaaaccggttagtgacgttttgcattcctctcacagagttaaaccttcttttttattgagcagtttggaaacagagtttttgtagaatatgccaagagatatttgggagagcattgaagcctatggtgacaagggaaatatcttcagataaaaactagaaagacagtttctgagaaactgctctgtgatctgtgcatttttctcatagagttaaactttctttagattgagcagtctggaaacactgtttttgtagaatatgtgaaaggatatatgggtgtgcattgaggcctatggtgaaaaagggaataccttcagagaaaaactatagagaagctttctgagaaacagctttgtcatgtgtgcactcatctcacagagttaaatctttcttttaattgagcagtttggaaaccctgttttggtagaaactgcgaaaggatatttgggagtgcattgaggcctgtggtgaaaaaggaaatatcttcagataaaaactacaaagaagcttcctcagaaactgctttctgatgtgctgattcctctaacagagttaaaccttccttttgagtgagcagtccggaaacactgtttaatagaatctatgaagtgatatataggagcacattgaggcctatggtgaataagaaaatatcttcagagaaaaactagaaagaagctttctgagaaactgttttgtgatgagggcattcgtctcacagaggtaaacatttcttttcattcagaaatttggaaacaatgtttctgtagaatctgccaagggatatttgggagtggagtgaggcctatggtgaaaaaagaaatatattcagataaatactagaaggatggtttctgagatactgctttgtgatgcgtgcattcttctcacagagttaaaaatttctttagattgagcagtctggaaaaactgtttttgtagaatctacaaggggatatatgggaacacagagtggcatgtgctgaacaaggaaatatcttcagaaaaaaagtagaaagaagctttctcagaaactgctttgtgatggttgcattaatctcacagagttaaacatttcctttgattgcacagctttgaaacactgttttggaagtatctgtgaagggatatttgggagcatatggaggccaatggtgaaaaaagaattatcttcagatcagtactagacagaagctttctcagaaaccactttgtgacgagtaatcatctcacagatttaaaccttccttttgattgagcagtttggaaaaactgttttggtagaatctgcaaaggaatatttgggagcgctttgaaggctatggtgaaaaaggcaataacttcatttaaaaactataaagaagctttctcagaaactgctttgtgatggttgcattcatctcacagagttaaacctttcctttgattgtgcagtttggaaacactgttttagtggcatctgagaaaggatatttgggagctctttgaggcctatgcagagaaaggaaatatcatcaggtaaaaactagaaagaagctttctgacaaactgcttcatgatgagtgcattcatctcacagagttaaacctttcatttcattgagcagtttggcaacattgtttttttggaatctgagaggatatattttgtagtgctttaaggcctagggtgaaaaaggaaatatcttcagataaaaactggaaagatgctttctgggaaactgctttgtgatgtgtgcattcatctcacagagttaaaccttccttttgattgtgcagtttggaagcactgttgtggtagaatctgcaaagggatatttgggagcacattctttggtgaaaaatgaaacatcttcatagaaaaactagaaagaagctttctgagaaaccacttgctggtgtgtgtatttattgcacagagttaaacttttcttttcactgagtcatttgggaacagtgtttttttcaaacctgagaagagatatttgggagcattttgaggcctatgatgaaaaaggaaatttcttcagataataacaacaaagaagctttctcagaaaccattttggtttttctcattcttctcacagagtaaaatctttcttctgatgagcagtctggaaacactttttttgtagaatctatgaagggatatatgggagcgcattgtcggctacggtgaaaaaggaaatattttcagagaaaatttacaaacaagctttctgggaaattactttgatgcgtgcattcatcacacagagttaaactttattttgactgtgtcctttggaaaaactgtctttgtagaatccgtgaaggtatatttgggagcactttgaggcctaaggtgaaaaaggaaatattttcagatagaagctagaaagaagctttctgagaaactgctatgtgatgtgtgcaatcatctcacagagttgaacctttctttagtttgaacggtttggaaaatctgttctggaagaatctgcaaagggataattgggagcactttcagggctatgaccaaaaaggcaataacttcagataaaaactagaaagaagctttctcagaaaccgctttgtgatggttgcattcatctcaaaaggataaacctttcctttgatttcgcggtttggaaacactgttttggaagtatctgcgaagggatatttgggagcgcattgaaggcaatggtgaaaaaggaaacatcttcagatcaaaattaaaaagaagctttctcagaactactttgtgatgtgtgtgttcttctcacagagttaaatcattctttggattaagcgcttttgaaatgctgttttggtagcatctgcaaagggacatttgggagctctttgaagcctatgttgaaaaaggaaatatctgcagataaaaagtagaaagaagctttctgagaaactgctttggaatgagttcattcgtctcacagtgttaaacctttcttttcattgagcagtttggaaacacagttgtacaatctgagaagggatatttgggagcgatttgaagtctatggtgaaaaacggaatatcttcagataaaaactagaaagaagctttctgggtaactgccttgtgatgtgtgcattcatctcacagagttaaacctttcttttgattgagcagtttggaaacactcttttgttagaatctgcggggagatatttgggagcacattgatgtctctggtgaaaaaggaaatagcttcagagaagaactagaaaaaatcttcctgagaaactgctttgtgatgtgtgcattcatcttacagagttaaactcttcattttattgagcagtttgggaacagtgtttttgtagaatctgagaagagatatttgggagtgcttttaggcctatggtgaaaaacgaaatatgttcaggtaaaaactagaaggaagctttccgggaaacagctttgtgatgtgtgcattcatctcacagaggtaaacttttattttgattgagcagtttggaaacactgtttttgtagaatctggaaagcgatattttggagcgcttttaggcctatggtgaaaaaggaaacatcttcagataaaaacttgaaagaagctttctgagaaacagctttgtgatgattgcattcatctcacaggattaaacctttctttcatttgaacagtttggaaacactgtttttatagaatctgtgaagggatatttgggagcacattgaggcctatggtgaaaaaggaaatatcttcagatgaaaacttgaaagaagctttctgagaaacaactttgtgatgagtgcattcatctcacagaactaaaccttacttttgattgagcaatttggaaacgtggtttttctagagtctgcaaaggaatagttggaacgtgttgaggcctaagttggaaaaggagatatcttcagatgaaaactagaaagaagctttctgagaaacttctttttgatgtgtacattcttctaacagaagtacatctttctattgaatgagcagtttggtaacactgttttttcagaatctgtgaaggtatgtttaggaacgcattgaggcctagggtagtaaaggaaatatcctcagaaaaaaatgagaaagatttatgagaaatagcattgtgatgtgtgcattcatcccacagagttaaacctttcttttgattcagcagtttggaaacactttatgtgtagaatctgcaattggatctttgggaacccattgaggcatttggtgaaaaaggaaatatcttgagataaatactaggaagaagccttctcagaaactgccttgtgatttgtgcattcttctcacagatttaaacgtttattttgattgagcagtctggaaacactgtttgcgtgcaatcaatgaagggatatttgggagtgcattgaggcctatggtgaaaaaggaaatatcttcagataaatactagaaagaaactttctcagaaaccaccttgcaatgtgagaattcttcttacagagtgaaagctttttttttgattgagcactctggtaacactgtttttgtagaacatgtgaagggatatttgggaatacattgaggcctatcgtgaaaaaggaaatatcttcagatcaaaactagaaagaagctttctgagaaactgcttttgatgagtgcattcatctcacagaagtacacctttcttttgattgaagtttggcaacagtatttttgtagaaactgagaagggatatttggtagcacattgaggcctatggtgaaaaacgaaacatcttcagatataaactagaaagaagctttctgagaaactgctttgtgatgactgcattcatctcacaaggttaaacctttcttttgattgagcagtttggaaacaaagtttttgcagaatctgtaaagggatatttaggagcacattgaggcctatggtgaaaaaggaaataacttcagatgaaaactagaaagaagctttattagaaactggtttgtgatgtgtgcatccatgtcacagagttaaaattttgttttgattgagcagtttggaaataatgtttcggtagaatctgagaagggatatttgggagcatattgaggcatatgttgagagaggaaatatcttcagataaaatctagaaagaagcattctgagaaactgctttgtggtgtgtgcattcatctcacagagttaaacttttttttttgattgggcagtttggaaacactgtttttgtagaatctgcaatgcaatattttggagtgcttttaggggtatggtgaaaaaggaatatcttcagataaaaactagaaagaaactttctgagaaacagctttgggatgagtgcattcatctcacagagttaaacctttcttttgatcaagcagtttggaaacactgtttttatagaatctgcaaagggatatttgggaatgcattgaggcctgtggtgagaaaggaaatagcttcagatgaaaactagaaagaagatttatgagaaactgctttgtgaagagtgcattcatctcacagacttaaacctttttttgattgaggagtttggaaacggagtttttgtagaatctatggagggatatttgggaatgaattgaggtctatggtgaaaaaggaaataccttcacatataaactagagagaagctttctgagaaactgctttgtgatgtgtgcattcatctcacagaggtaaacgtttcttttcattgagcagtttggaaactctgttcttctagaatctgcaaagggatatttatgagctttttgaggcctaagttgggaaagcagatatcttcagatgaaaactagaaagaaactttctgagaaactgctttttgatgtgtgcattcttctaagagaattaaacctttgtattgaatgagcagtttggcaacactgtttttgcagaatctgtgaagatatatttaggaacacattgagggctatggtgaaaaaggaaatatcttcagaaaaaaatgagaaagatttcttagaaatagcattgtgatgtgtgcattcattcaacagagttaaatcattctttaattgaacagtttggaaacactgtttttgtagaatctgtgaagggatatttcggagcccattgagacctttggtgaaaaaggaaatatcttcaaataaaagctagaaagaagctttccaagaaactgcttttcgatgtgtgcattcatctcacagagtaaaacctttcttttgatagagcagtttggaaaaactgtttttgtagaatctgcaaagggatacttgggggagcattggggtctatggtgaaaaaggaaacatcctcagatgtaaactagaaagaagctttctgagaagcttttttgtgatgtgtgctttcatctcacagagttaaacttttattttgattgagcagtttggaaacacagtttttgttgactctgccaagggatatttaggagtacattgaggactatggtgaaaaaggaaataatttcagacaaaaactagaaagaagctttctcagaaacaggtttgtgaattttgcattcatctcacacagtaaaacccttcttttgatttagcagtttggaaatactgttttggtagaatctgcgaagggatatttgggagcacattgaggcctatgttgaaaaaggaaatatcttcagattaaaaacttgaaagaaacattctgagaaactgctttgtgatgagttcattcaactcacagagctaaacttttcttttaattgagtagtttgaaaatgctgtttttttggtatctgagaagagatatttgggagcactttgaggcctgtattgaaaaaggatataccttcaaataaaaactagaaagaacctttctgggaaaatgctttgtgatgtgttcattcatttcacagttaaacctttttttcaattgagcagtttggaaacactgtttttgtagaaccagcaaagtgatattttggagccctttaggcacatggtgaaaaaggaaatatcttcagacaaaaactagaaagaatgtttctgagaaacagctttgtgatgactgcattcatctcacagacttaaacctttcttttgattgagcagtttggaaacactgtttttatagagtctgtgaagtgatatttgggaacgcattaaggcctatggtgaaaatggaaataccttcagatgaaaactagaaagaaggtttatgagaaacttctttgagaagagtgcagtcatctcacagacttaaacctttcttcttattgagcagtttggaaacactgttcttgtagaatctgcaaagggatatttgggaacttattgaggcctatgttgtaaaaggagatatcttcagatgaaaactagaaagaatctttctgaaaaactcctttctgatgtgtgcattcttctaagagaattaaaactttctattgaatgagcagtttggtaacactgtttttgcagaatctgtgaagacatatttaggaacgcattgaggcctatggtgaaaaaagaaatatcctcagaaaaaaacgagaaagatttctgagaaatagcattgtgatgtgtgcattcatcccacagagttaaacctttctttagttgaacagtttggaaacactctttttgtagaatctgtgaaaggatatttcagagaccattgaagcctatggtgaaaaaggaaatgtcttcagataaaaaccagaaggaagcattctgggaaactgctttgtgatgtatgcattcagcacaaagagttaaatcttacttttgactcagcagtttggaaacactattttggaagtatctgccaagggatatttgggagcgcattgagtcctatggtgaaaaataaaatatcttcagaaaaaactagaaagaagctttctgagaaactgctttgtgatgagtgcttttgtgtcacagagataaacctttcttttaattgagcagttcagaaacactgttttagtagaatctgtaaggggatattgggcagtgcattgatgcctatggtgaaaaatgaaatatcttctgataaaaactagaaagaagctttctgagaaactgctttgtgatgagtgcattcatctcacagggtgaaaactttctttaatttagcgctttgacaccagtgattttgtacaatctgagaacagatatttgggagcacttggaggcctatggtgaataatgaatctgctttgagatttgtgtattcttctcaatgagttaaacttttgtgttgattgagcagtgtggaaacactgtttttttagaatatgtgaagggatattggggagcactttgacgtctatgtcaaaaaaggaaatatcttcagataaatactagaaagaagctttctcacaaactgtgttttgatgtgtgcattcttctcacagatttcaacctcacttttgattgagcagtttgaaaacactgtttctgtaaattataccaagggatatacacgagcactttgaggcatatggtgataaaggaaatatcttgagataaaaactagaaagaatctttctgaaatctgctttgtgatgtgtgcattcatctgacagaggtaaaccgttattttgattaagcagtttggaaacagtttctgtaaattctaccaaggtatatttgggagttcattgaggtctattgtgaaataggaagtatattcagagaaatactagaaagaacgcttctgagaaactgctttgtgatgagtgcatccatctcatagagttgaactttcttttgattgagcagtttggcaaccctgtttttgaagaatctgagaaaggacaattggtagtgctttgaggcctactgtgaaaaatgaattatgttagaaaaaactagaaagaagctttgtgggaaactgctttgtgatttgtgcattcagctggcagagttaatcctttcttttgattgagcagtttggaaacaatgtttttgtaaaacatgcaaagggatatttgggagtgcttcgaggccagtggtgaaaaaggaaatatcttcagattaaaactagaaaaagctttctggaaactgatttgtgatgtgtacattcttatcacagaggttaaccattattttcattgagcactctggaaacactgtttctgtaaaatgtaccaagggatatttaggagtgcattgaggcatatagtgaaaaagaaaatatcttcagatacaaattagaaagaaacatttctgagaaacagctctgggatgtgtgcattcatcatgtagagttaaaatttccttttcattgggccttttgggaacactgtttttgtagaagctgagaacggataattgagagtgctttgacaccaaaagtgaaaaaggaaatatgttagataaaactagaaagaagctttctgggaaattgctttgtgaattgtgcattcatctcacagagttaaacctttcttttgattgaacagtttggaaacactgtttaggcagaatctgcgaagggacatttgggagtgcattgaggcctatggagaaataggaaatatcttcagataaatactagaaagaactttctcagaaactgctttgtgatgtctgcattcttccaccagtgttaaacctttcttttgattgagcagtttggaaacactgtttgtgtacaatcaatgaaaggatacatgggagcacatgggggcctatggtgaaaagtgaaatatctttggagaaaaactagaaagaagctttctgagaaagtgctttgttatgtgtgcattcttctgagagtaaaacctttcttttgaatgtggaatttggaaactgtttatgtagaatctgcaaatgaatatatgggagtgctgaggcctatggtgaaaaaggaaatatcttcagagaaaaactagaaagaaatttctgagaaactgctttgtgatgtgcacattcttcacacagagttagccctttcttttgattgagccatctagaaatattgtttttgtggaatctacgaagggatatatgagattgcattgaggcctaaggtgaaaaaggaaatatctttagataaaaactacaaagaatctttctgagaaactgctacatgatgtgtacattcatctcgcatatttaaacctttcttgtgattgaccagtttggcaacaatgttttggtaaaatctttgaagggtatttgggtgagtgttgaggcctatggtgaaaaaggaaatatctgtagacaaataatagaaagaaggtttctggaaactgcattcatctcacagagttaaacccatcttttgattgagcagttcagcaactctgtttttgtggaatctgccaaggaatatttcggatgcattgaggcctattgtgaaaaaggaaatatcttcaggtaaatacttgaaggaagctttctggaaactgatttgttatttatacattcatctcacagtattaaaccataattttgtttgatcagtttggaaacattgcttctgtaaaattcaccaaggggtatttgggaatgtattgaggcctgtagtataaaaggaaatatcttcagataaaaaatagaaagacgctttctgagaaactgctttgtgatgagtgcattcacctcaaagagttcaactttttttttcaattgagtagcttggcaacaccgtttttgtagaatctgcaaaggggcatttttcagtgctttgaggcccatggtgaaaaaggaaatatcttcacataaacactagaaagaagttttctgagaaactactctgtgatgagtgcattcagctcacagaagtaaacctttcttttgattgagtagtttggaaacactgcttttttaaatctgtgaagggacatttggaagtgcattgaggcctatggtgaaaaaggaaatatctccagataaaagccagaaagaagctttctcagaaactgctttgtgatgtgtgcattcatctaacagagttgaacctttcttttgagtgtgcagtttggaaacactgtttttgtagaatttgtgaagggacatatgggagccctgaggcctatggtgagaaaggaaatatcttcagagaaaaactagaaagaaatttctgagaaactggtttgtgatgtgtgcattctttgcacacagttaaacctttcttttgattgattagtgtggatacattgtttttgtggaatctgagaagggatttgttggagcactttgaggcttatggtgaaaaaggaaacatcttctgataaatactagaaagaagcccctcagaaaccactttgtgatgtgtgcattcttctcccagagtttaatttcatttttgattaagcattttggaaacactgttcctgtaaattctaccaagggatatataaaagccctttaaggcctatggtgttaaaggaaataccttcagagaagaactacaatgaagcattctgagaatctgctttggaatgactgcattcatctcacagagttaaaccttccttttgattgagctgtttggaaacactgttttggtagaatatttgaaatgatatttgggagtgctttgaggcctataatgaaaaaggaaatatattgagaaaaaaataaaaagaagctttctgagaaactggtttgtgataagtgcattcatctcacagaattaaacatttctttttatggagcaatttggaaaaactgtgtttcagaatctctaaagggatatttaagagctccttgaagcctatggtgaaaaaggaaatgtattcagataaatactagaaagaaactttctcagaaactgctttgtgatatgagcattcttctcacagagtaaaacctttcttttgattcaccaggttggaaacactgtttttgtagaatctgcaaaaggatacttgggagcgcattgaggcctatggtgaaaaatgaaatatcttcagataaaaactagaaagaaattttctcagaaaccgctttgtgatgtgtgcattcttctcactgaactcaaccgttcttttgattgagcagtttggaaacactgttttggtagaatctgtgatgggatatttgggagcacattgaggcctgtagtgaaaaaggaaatagcttcagataaaaactagaaagaggctttctcagaaactgctttgtgaattgtccgttcttgtcccagagttaaacctttctcttcattgagtagtttgcacatgctgtttttatagaatctatgaagggatatttgggagtgctatgaggcctatggtgaaaaagaaaatatcttcagataaaatctagaaagaagctttatgagaaactgttttgtaatgagtacattaatttcatagagttaacccttttttgattgagaagttaggaaacatgatttttttacaatctgagaaggaatattttggagtgatttgaggcctatggtgaaaaacgaaatatcttcagataaaaattagaaagaatctttctgggaaactgctttatgatgtgctcattcatctgtaacagttaaaactctcttttgattgagcactttggaaacactgttttgttaggatccatgaaggaatatttgtgcactctttgagtcctatggtggaaaaagaaatatcttcagataaaaactagaaagaagcattctaagaaactgctctgtgaagagtgcattcacctcacagagttaaacctttcttttcattgggcactttggcaacactttttttgaattacttaagaagggatatttgggagtattttaaggctgagggtaaaaaaggaaatatcttcagataaaaactagaaagaagtattctgagaaactgctttgtgatgtgtgcattcagcatatagagttaaaactgttttgattgggcagtttggaaacactgtttttgtagaatttgagaagggatatttgggagctctttgaggcctatggtgaaaagggaaatatcatcaggtaaatactagaaaaaagttttctggaaaaagttttgtgatttgtgcattcatctcatacaattaaacctttcttttgattgagcaatttggaaacactgtttttttttagaatctgccaagggatattttggagtgctttgagtcctatggagaaaaagaaaatatcttcagataaatactagaaggaagatttctcagaaactgctttgtgatgtgtgcattcttctcacagagtttaacctcacttttcattgagcagtttggaaacactgtttctgtaaattctaaggagggatatatgggagcccattgatgcctatggtgaaaaaggaaatatcttcagacaaaaactaaaaagaagctttctgagaaactgctttgtcatgtgtggatttatgtcacagaggcaaacctttcttttgattgagcattttggacacactcttttgttagaatctgtgaagggatatttggatgtgcattgaggtctgtgttgaataagaaaatatcttcagttaaaaactagaaagaagctttctgagaatctgctttgtgatgagttcattcatctcacagagttaaatatttctattgtttgagcagttcagagaagggatatttgggagtgcattaaggtatatggtgaaaaaggaaataccttcagataaaaactgaaagaatctttctgagaaactgctttgtgatggatgcattcactttaaagaataaaaactgtctgttgattgagcagtttggaaacactgtttttgtataacctgcagaggtatattttggagcacatgtaggcctgtggagaaaaaggaaatatcttcagataaatactagaaagaagctttctcagagacccctttgtgacgtgtgcattcttcttacagagttaaacatttcttttgattgagcagtttggaaacactgtttttgtaggatatgcgacggtatatttgggagagtgttgaggcctatggtgaaaaatgaaatatcttcagataaaaactaaaaagaaactttcccagaatctgttttgtgttgcttgcattcttctcacagagttaaacctttcttttcattgagcagttatgacacactgtttttgtagactctgtggagggatatatgggagcacattgaggtttagggtgaagaaggaaatatcttcagagcaatactatataaagttttctgagaaacagctttgtgatctgtgaatttatctcacggagtttaacctttgtttttattgaggagtttggaaacactgttttggtagaatctgtgaaggaatattttgtatcgcattggggcctatggtgaaaaaggacacatcttcagataaaaaccagaaaaaagctttttgagatactgatttgtgatgtgtgcattcttctcacagagttaaacaggtattttgattgagcagtttagaaacccagtttttgtagaacctatgaagggatgtatgggagagcatagaggcctatggttgaaaagaaaataccttgagataaaaattagaaagaaattttcaaggaaactgctttgtgatgtgtgcattcacttcacagagttaaactttacttttgatggagctgtttgtaacactttttcttttttaaatctgagaagagatatttgggagcgttatgaggcatatggtgaaaaatgaaatatcttgaggtaaataatagaaagaagttttctgtgaaatggctttgtgatttgtgcattcatctcacataggcaaacctttgttttgagtgagccattcagaaacactgtttttttagaatctgcaagggaatatttgggagcacattgaggcctgtggtgaaaaaggaaatgtcttcagagaaaaactaaaaagaaactttctgagaaacttctttatgatgtgtgcattcttctctcaaagttaaatcttaatatgactgagcagtttggaaacatggtttttgtagtataaacaaagggatatatgagagtgctttgaggctcatggtgaaaaatgaaatgtcttcagagaaaacctaaaaagaatctttctgagaaactgttttgtgatgtgtgcactcagcacaaagagttaaacctttcttttgagtgagcagttaggaaacaatgtgttggtagaatctctgaagggatattttggagtgaatgtagacattgtgaaaaaagaaatatcttcagataaaaactggaatctttctgagaaactgcttggtgaccagtgcattcatctccccgagttaaacctttcttttgattgtgcagtctggaaacatggtttttctagtataagcaaagggatatatgtgttcactttgaggcccatggtgaaaaacaaaatattttcagagaaaatctgcaaagaacttttctgagaaactgctttgtgatctgtgcattcatctcacagagttaaaccttaatttgattgagtagtttggaaacactggttggcagaatctgtgatgggatatttggtagtgcattgaggcctattgtgaaataggaaatatcttaagaaaaaaattaaaggaagctttctgagaaatggctttgtgatgaatgcattcatctcacagaattaaaactttcctttgattgagcagtttggaaacactgtttatgtctaatctacaaaatgatatttgggaatgcattgagacctaggcaaatatctttagataaatactagaaagaagctttctctgaaaccactttgtgatgtgtggatatttctcacagagttaaacctctattttgattgtgcacttatttatttatttatttatttgaaacaaagtctcactctttcacccaggctggagtgcagtggtgtgatcttggcacactgcaagctctgcctcctgggttcacgccattctcttgcctcagcctcctgagtagctgggactacttgcacctgccacaaggccctgttaattttttgtatttttagtagaaatggggtatcactgtattagtcaggatggtctcgatttcctgaccttgtgatccacacgtctcagcctcccaaggtgctgggagtacaggcatgggccacgatgcctggccttgtgcagtttctaaacactgtttttgcaaaatttgtgaagggatatttgggagtgctctgaagcctatgaggaaatagtaaatatctttggaaaaaaaactaaaaagatactttctgtgagactgctttgtgttgagtgcattcatcacccagaattaaactctattaattgaacagtttggaaacactgttttttaagaatctgcaaagggatagttgggaccacattgaggcctatgtgaaaaaggaaatatcttcagataaatactagaaagaatctttctcagaaagccctttgtgatgtgtgtattcttctccaaaattaaacctttattttgattgagcagtttggaaacactgtttttgaagaatctgtgagggaatatttgtgagcgctttgaagcctatggtgaaaaaggaaatatcgtcagaaaattattggaaggaagctttctgggaaactgatttgagatgtgtgcattcatctcgcagagattagcctttcttttgattgagcagtttggagtcactgtttaggtagaatctgtgaagggatatttgggagcgcatagaggcctgaggtgataaaggaaatatcttcagacaaaattagaaaggagtattctcagaaaccgctttgtgatgtgtgcattcttttcacagagttaaacctttcttttgattgggcagtctggaaacacggtttttgtagtataaacaaagggatatatgggagcactttgaagcccatggtgaaaaatgaaataacttcagagaaaaactacaaagaagttttctgagaaactgctttgtttaactctcacagagttgaacttaatttgattgcgtagtttggaaacactgttttggcagaatctgcagtgggatatttgggaggacattgcgacttattgtgaaataggaaatatcatcagaaaaaaatgaaaaaaaagctttctgagaaactgctttgtgattagtgcattcatctcacagaattaaatctttctttcgattgagcagtttggaaacaatgttcatgtagaatctgcaaagggatatttgggaaaacgttcaggcctagggaaatagcttcatataaatactagaaagaagctttctcagaaactgatttgtgatgtgtggattcttctcacagagttaaaactgtcctttgattgtccagtttttaacccctgtttttgaagaatctgcaaagggatatttgggagccctttgaggcctatagtgaaaaaggaaatatcttcagataaaaactggaaagattctttctgagaaacagctttgtgatgtgtgcattcgtcacacagtggtaaacctttcctttgattgagctgtttcaatacactgttcttgtagaatctatgaaaggatatttgggagcactttgtggcctaaggtgaaatagtaaatatattcagaaaaaaacaaaaggaagcttcctgagaaactgctttgtgatgaggacattcatctcacagaaataaacctttctattgattgagcagtttggaaacactgtttttttagaatcagcaaagggatatttgtgagcacattgagggcatggtgaaaaaggaaaatctacagataaatactactaggaagttttctgcattcatctcacagaattaaacttctttttgattgaggagtttggaaacactgtttttgtagaatctgagtagggatatttgtgagcactttgtggcttatggtggaaaaggaaatatcttcagatgaatactagaaataagacttctgggaaactgctttgtgatgagtgcattcatctcacagagttaagcctttcttttgattaagcagtttggaatcaccgttttagtagaatctgctcaaggatatttgggagtgcattgggacctatggtgataaaggaaatatcttcagataaaaattagaaagaagctttcttggaaactggtttgtgatgtgtgccttcttctcacagagttaaacatttcttttgattgaacagtctggaaacatgtttttgcagcataaacaaagggatatatggcagcgctttcagtcccatggtgaaaagtgaaatatcttcagagaaaaactgcaaagaatctttctgagaaactgctttgtgaagtgtgcattcacctcacagagataaacttaatttcattgagcagtttggaaacactgttttggcagaatctgtgatggtgtacttgggagggcattgaggcctattgtgaaataggacatatcttcagataaaatctaaaaagaagccttctgagaactgctttgtgaggactgttttgtgaggactgcattcatctcacagaaataaaccattcttttgattgagcagtttggaaacactgtttacatagaatctacaaagggatatgtgggaatgcagcgatgattagggaaatatcttcatataaatactagaaagaagctttctcagaaactgctctgtgatgtgtgtattcttctaacagagttaaacctctctattaattgtacagtttcaaacactctttttgaagaatctgccaaggggtatttgggagcactttgaggcctttagtgaaaaatgaaatatcttcatataacaactagaaagaagctttctgagaaacagcttagtaatgtgtgtattcatcacacagtggtaaacttttcctttgattgagctgtttggaaacactgtttttgtagaatctgcaaaaggttattttggagtgcttttatgcctatggtgaaatagtaaatatattcagaaaaaaactgaaatgaagctttctgagaaaccgctttgtgatgagtgcattcatctcacagaaataaacctttctattgattgagcagtttggaaacactgtttttatagaatctgctaaggtatatttgggaggtcattgaggcctatggcgaaaaaggaaatatcttcagataaatactagaaagaagctttctcagaaactcctttgtgatgtgtgcattcttctcgtggaattaaacctttctttagattgagccgttttgcaacactgtttttttagtatctgacaaggaatatttgggagggctttgaagcctacgttgaaaaggaaatatcttcagataaaaactatatagaagctttctgggaaactgctttgtgatttctgcattcatctcagagagttaaacctttcttttaattgagcagtttgtaaacactgtttttttagaatttacaaagggacatttggaagctctttgaggcctatggtcaaaaaggaaatatgttcagataaaaagtagaaagaagctttctggaaacttctttctgatgtgtacattcttttcaaagaggtgaaccattattttgattgagaactctggaaacactgtttttggaaaatctgcgaatggatatttgggagtgtattgaggcctacagtgaaaaaggaaatatcttcagataaaaaatagaagaacttttctcagaaactgctttgtgatgtgtgcattcttctcacagaggtaaacctttattttgattgagcaatttgaatacactgtttttgtggaatctacgaagtgatatacagagtgcaatggggcctatggtgcaaaaggaaatatcctcggagaaaaactagaaagaagcattatcagaaattgcttttggatatgtgcattcatctcacagagttaaacctttcttttgattgagaagtttggaaactttgtttttgtagaatctgcaaagggatatttgggagtgcattgaggcctatggtagaaaggaaacatcttcagattaaaactagtgagaatcattttaagaaactgcttggtgatgagtgcattcatctcacatagttaaacctttcttttgattgggaagtttgaaaagacagtttttgcagaatcagcgaagggatatttgggagcacttagaggcctatggtgaaaaaggaaatatcttcagataaaaactacaaagaagctgtgtcagaaagcactttgtgtggtgtgaattcttctcacagagtttaacctcagtttgattgagcagtttggaaacactgtttctttaaattctaccaagggatatatggaagtgcattgaggcttatggtgaaaaaggaaatatcttcagggaaaaactagaaagaatatttatgagaaaccgctttgtgatgtttgcattcatctcatggttttaaaactttcttttgattgagtagtttggcaacactgtttttgtaccatctgtgaagggatatttgggagtgctttgaagcctatggtgaaaaaggaagtattttcagggaaaaagtagaaagaagctttctgggaaactgcttttgatgtttgcattcaggtcaaagaattaaaactttctattgacttagcagttttgggacactgtttttgtataatctgcagagttatatttaggagcacatggatgcctatggtgaaaaaagaaatatcctcagatttcctttgtcctgattgagcagtttggaaccactgtttttgtagaatctgtgaagggatatttgggatacattcaggcttatggtgaaaaatgtaatatcctcagataaaaactagaaagatttctgagaaagctttgtgatgtgtgttttcatctcacagttaaacctttctttgattgagcagtttcaaacaactgtttttgtaggatttgggaaaggatgtttgggaacacattgaggcctatggtcaaaaaggaaatactttcagaaaaaaaccagaacaaatcttttggggaaactgctttgtgatgtgtagattcatgtcacagttgcactattcttttgatgaggcagtttggaaacactgtttttgtagaatctgcgaagggatatatgggagcgcattgaggcatatggtgaaaaaagaaatatcttcatgtcaaaactagaaagacactttctgcagaactgctttgtaatgtgtgcatttgtctcacagagataacgctttcttttgattgagtagtttggaaacactgtttttatagaatctgcaaaaggttatttaggaatgcattgaggactatggtgaaaaaggaaatatcctcagatataaactagaaaactttctgattaacagctttatgatgtgtccattcatctcacagaattaaaattttctattgatgtagcattttggaaacactgtttttgtagaatctgcgaagggatatatgggagtacattgaggcctctggtaaaaaagaaactatcttcagataaaaacttaaaagaagctttcagattaactgctttgtgatgtgttcattcatctcacagtgttaaactttcttttaattgagcatcttggaaacactgtttttgtagaatctgcaaagtgatatttaggagcacattgagtcctatggagaaaaaggaaatatcctcagataaaaaagagaaaggagatttctgagaaactgctttgtgatgtctgcttccgtctcatagaatttaagcattcttttgattaagtagtttggaaacacagtttttgcagaatctgtgaaaggatatttgggaatgcatgggacgtatggtaagagaggatatatcctcacataaaaaccagaaagatgttttctgaggaactattttgtaatgtgtacattcttctcacagagttacaactttcttttggttgagcagttaggaaacactatttttgtagaatctgcgaagggatatttgggagtgcattgaagcctatggtgaaaaaggaaatatattcacataaaaactagaaagacattttctgagaaactgctttgtgatgtgtgcattggtctcacaaagataaggctttctatttatttagcagtttggaaacactgtttttgtagaatctgtgaaaggatacatgggaacgcaatctggcctatgttgaaaaaggaaatactctcagacaaaatcttgaaagaagttttctgattaactgctttgtgaagtgtccattcatcttacagagttaaactttatttccattgagcatcttggaaacacaattttgtagaatctgcaaagggataatttgtagcacattgtggcctatggtgaataaggaaataccttcacataaaaactagaaagaggctttctggaaattgctttgtgatgtctgcatttgtctcagagagtttaagcattcttttgattaagaagtttggaaaacagttttggtagaatctgggaaaggatatttgggagcacattggggcctatggtgagaaaggaaatatcctcagaagaaaaccagaaagatgctctctgaggaactgttttgtgatgtgtacattcatctcacagagttacgattttcttttgattgagcagtttggaaacactatttttgtagaatctgcaaacggatattttggaatgcaatgaggcctatggtgaaaaaggaaatatcttcacataaataatagaaataagctttctgagaaactgctttgtgatgtgtgcattcatctcacagagttacaattttcttttgattgagcattgttgtgggaagtcagcaaccacaaatggagggaccggctaaaggcatggtagaagaacataaattttgaagatttcatggacatttattagttccccaaattaatacttttatattttcttatgcctgtctttactgcaatctctggacataaattgtgaagatctcatgtacatttatcacatccccaatcaatgcccttgtgatttcctatgcctgtctttaatctcttaatcccatcatcttcgtaagctaaggaggatgtatgtcgcctcaggacccatgatgattgtgttaactgcacaaattgtttgtagagcttgtgtgtttgaacaatacgaaatctgggcaccttgaaaaaagaagatgataactgcaggttcagggagcaagagagataaccttaaacactgaccaccagtaagtctggcagaacttacttctcttctttcaaaagcaaatggaagaaatatcgccgaattctttttctcagcaaggaacacccctgagaaagagaatgcttccctgagggtaggcctctgaaatggctgctttgtgggtggccatcttttatggttgcagctgcaggggtgaaataagcccccgtctcctgcagccctcccaggcttattaggatgaggaaattcctgcctaataaattttgatcagaccagttgtctgatcaaaccctgtctcaaaccctgtctcctgataagatgttatcaatgacagtgtgtgcctgaaacttctttagcaattgtaattttgccccggtcctgtggttctgtgatcccgccctgcctccatttaccttgtgatatctcattatcttgtgaagcatgtgatctctgtgaaccacaccctattctacactacctacccttctgaaaatcactaatgaaaacttgctggttttatggctcagggggcatcatggaatgtgccgacatgtgatgcctcccctggacactcagctttaaaatttctctctgttgtattttatccctttatttctcagaccagatgacactaagggaaaataaaaaagaacctactagaaatgtcgggggtaaatttcacccgatatttggctgagtttctcctgataaagcatcttggaaacactgtttttgttgaatctgtgaagggatatttcggagcacgttgaggcctatggtgaaaaaggaaatatcttcacatacaaactagaaagaagctttctgagaaagtgctttctgatgtgtgcattcacctgacagttaatcctttcttttgattgagcagtttggaaagactgtgtttgtagaatctgcgatgggagatttggaagcatattgaagcctatagtgataaaggaaatatcttcagacaaaaactagaaagaagctttctgaaaaactgctttgtgatgtgtgcattcatctcacagagttaaacctttcttttggttgagcagtttggaaacactgttttggaaaaatttgcgaagagatatttgggaatgcattgaagcatatggtggaaaaggaaataaccttagataaaaagtaaaaagacctctgagaaacagcttcatgatgattggattcatctcacagtgttaaaactttcttttgatagagcagtttggaatcattgtttttgtagaatctgtgaagggatatttgggagtgcattgaggcctatggagaaaaagcaaatatcttcagataaaaaatagaaagaatttttccaagacactgttttggatgtgtgcattcccctcacagagctaaaggattctcttcattgaggagtatggaaatactgtttttgtagaaactgtgaaggaatatttgggaccactttgaggcctatggtgaaacaggaaatgccttagggtaaaagctagaaagaagctttctgagaagctgctgtgtgatatctacattcatctcacagagataaagcctacttttgatttagcagttttgaaacactgtgtagaatctgcaaaaggatgttttggagtgcattgaggactgtggtgaaaaaggaaatatcttcataaaaacctgaaagaagcttttggagaaactgctttgtgatgtgtgctttcatcacatagagttaaacaaatattttgatggagcactttggtaacactgtttttgtagaatctaggaagttatatttgggagcactttgaggtctgcagtgaaaaaggaaatattctcagatgaaaactagaaagaagctttctgagaaaatgctttgggatgtgcgcattcatctcacagaatttcacctttctgacatttgagcagttaggaaacactgtttttgtagaatctgtgatgggatattttggagtgcattgagacctactgtgaaaaaggaaacacctttacataaaaactagaaggatactttctcagaaacaaatttgtgttgtgtgcatttgttttactgagataaaactttcttttgattctgcagtttagaaacactgtttttgtagcatctgcaaaagcatacttgggaacgcaatgaggcctatagagaaaaaggaaatatcctcagataaaaaccagaaagatgctttctcaggaactgttttgtgatgtgtacattcatctcacaaagttacagctttcttttgattgagcagtttggaaacactatttttcttgaatctgcaaagggctatttgagaacgcaatgaggcctatggtgaaaaaagaaatatattcacatgaaaactagaatgatttctgagaaacagcttcgtgatgtgtgttttcatctcacagagttaatactttcttttgattgagaagtttggaaactgtttttctagaatctgcaaaggaatattagggagcacatggaggcctatggtgaaaaagacaatatcttctgatgaaaactagtaagaagctgtctgagacattgctttgtgatgtgtacattcacctcacacagagttaaaactttcttttcattgagcagtttggataaactctttttgtagaatctgcaaagggatatttggtagcaaattgaggcctagggtgaaaaaggaaatatcttcacacagaactagaaagacactttctgagaaactgctttgttatgtgtgcattcatggaatattttcacataaaaactagaaagaagctttctcagaaacagctttgtgatgtgtgaattcatcccacagagttaaatatttattttgattgaccagtttggaaacactggtttttagtgtctgtgagggatatttgggagagcatggagacctatggtaaaaaaaaaatcttcagatgcaaactagaaaggagttctctgagaaactgctttgtgatatgtgcattcatctcacagcattaaacatttgttttcattgagcagtttggaaacacagtttttgtagaatctgtgactgctttcatctcatagagttaaaactttcttttgatggatctgtttggaaacaatgtttttgtagaatctgcaaagggatatttgtgagtgtgatgatacctgtggtgaaaataaataaaatatcttcagacaaaaactacaagggagatttttgagaaactgctttgtgttgtgtgcatccatctcacagagtaaaacatttattttgatcgagcagtttggaaacactgtttttgtataatctgtgaagtgatgttaagtatcagaaaaaggcctatggtgaacaaggaaatatctttagataagaatggaaagaagtgttatgataaactgctttctgttgtgtgcattaatgtcactaagataagtccttctttttatgaaacagttcagaaacactgtttttgtataatctgcaaagggatatttgggagcacattgagccctatggcggaaaaggaaacatccccagagaagacctatacagaagctttctgagaaactgctttgtaatgtgtgcattcatctcacagaattaagcctttcttttgactgagccatttggaaacactgcttttgtttaatctgcaaaatgatattaggcagtgcaaaaagccaatggtgaacaaggaaatatcttcagaaaaaacctggaaagaagcattatgagaaactgctctctgatgtgtgcattcatctcacagaggtaagtctttcttttgatggaacagtttggaaacaccttttttttaaaatctgcaaagggatatttggaagtgcattgaggcctgtggtggaaaaggaaatatcctcagagaagacctatatggaaactttctgagaaactgctttgttatgtgtgcattcatctcacagagttaaatctttcttttgactgaggcgtttggaaacaccatttttgtagaaactgcgaaggcatatttcaaagcgcagtgatgcctatggtgaaaaaggaaatatcttcagataaaaactagaaagaaccttttttagaaactgctttgtgatgtatgaattcatttcacagagttaaacttttcttttgactgagcagtttggaaacactgtttttgtttaatctgcaaagtgttgtttggtagtgcaaataggcctattgtgaacaaggaaataccttcagataaaaactagaaagaagcgttatgagaaactgctttctgatgtgtgcattcatctctcagagttaaatccttcttttgatggaagagttcagaaacactgtttttatagagtctatgaagggatatttgggtgcatattgaggcctatggtggaaaagaaaatgtcttcagaaaagaactaggcagaagctatctgaaaaactgctttgtgatctgtgttttcacctcacagagttaaacgtttcttttgattgagtagtttagaaacactgtatttgtagaatctgcaaaggtatatttgggagcgcacagagacctatggtgaaaaacaaaatgtagtaggaaaaaaatagaaagaagcattttgagaaattgctctgtgatgtgtgtattcaactcacagaggtaaacttattttttcattaagcagtttgaaaacactgtttttgtagaatctgtgatgggatatttgtgagtgcattgtgcctatagtgttaaaggaaatatcttcggataaaaactagaaataagctttttgagaaactgctttctgatgtgtgcattcatcccccagagttaaaagtttcttttgactgagcagtttggaaacactctttttgcgctatcaacaaagtgatattaggtaacgcaaaaaaggctatggtgaagaaggaaatatcttcagataaaaatgggaaagaagctttatgagaaactgctttctgatgtgtgagttcaactcacagtgttaatcttgttttattgagcagttttgaaacactctttttgtaggatcagtgaagggatatttgggagtgcatcgaggcctatggtggaaaaggaaatatcttctgagaagaactacacagaagctatctgagaaactgttcgtgaagtgttcattcatctcacagagttaaattttcttttgattgagcagtttggaagtaaggtttttatagcatctgccaagagatatatgggagtgcaatgaagcctatgggatgaaggaaatatctttggacaaaaacaagaaagaagctttttgagaaactgctttgtgatgtgcacatttatctcacagacttagacatttcttttgattgatcagtttggaaacactgcttttgtagactctgcaaagggatatttgggagtgcatgaggcctatggtgaaaaaggaaataacttcagataaaaactacaaagaagctttctaagaaaaagctttgtgatgtgggcattcttctcacagtgttaaatgtttcttttgattgaggagtttggaaacactgtttttgtagaatctgcaaagggatatttgggagcacactgatgcatatgttgaaaaagcaaatatcttcctataaaagctagaaaaatcttcttgagaaactgctttgtgatgtatgcattcatctcaccgagttaaacttttcttttgactgagcagtttggaaacactgttgttgtagaatctgcgaagggatatttgggaatggattgtaacctattgtggaaaaggaaacatcttccaataaaaattagaaagaaggtttctgagaaactgcttcatggtgtgttcactcacctcactgagttaagccttctttttgattgagaagtttggaaacactgtttttgtagaatctgggaggggatactttgagcacagggataaatttgagtgctttgtggcctatgttgaaaaagaaatatcttcagataaaaactagagagaagatttctgagaaactgctttgtgatgtgtgcattcttctcacacagttaaacatttcttttcattgagcagattggaaacactctttttgtagaatctgcaaaggtatatttgggagcatattgaggcctatgttggaaaaggaaatatcttcagagaagaactagacagaacctatctgagaaacagttttatgatgtgtgcattcatcagagttaaacctttcttttgattgaacagtttggaaacaccgtttttgcggaatcagcaaaggtacatttgtgactgcactgaggcctatggtgaaaaaggaaatatctacagataaatagtagaaataagttttctgagaaactactttgtcatgtgtgcattcaacccacagaattaaacttgtttttcaattaagcagtttgcaaacactgtttatatagaagatgcgatgggatatttgggaatgctttgaagcctatggtgataaagtaaatatcttcagttagaaactataaagaagttttttgagaaactgctttgtgatgtgtccattaatctcacagggttaaacttttattttgaatgaggaacttggaaactctgtttttgcaaaatctgccaagcattattatgtggcacaaaatagcctatggtgaacaaggaaatatcttcagataaaagctggacagaagggttgggagaaactcctttctaatgtgtgcattcatctcacagagttaagtcattcttttgatggaacagtttgaaaacactgtttttgtagaatctgtgaagagatatttgggagcgcattgaggcctatggtggaagaggaaatatcttcagagaagaattaggaagaagctttctgagaaaatgctttgtgttgtgtgcatgtgcagtcatctcacagagttaaacctttcttttgactgagcagattggaaacactgtttttgtagtacctgcaaagggatgtttgggagctcattgaagccaatggtgaaaaaggaaatacctttggataaagactagaaggaagctttttgagaaacggctttgtgatgtgtgcattcatcttacagagttaaacctttcttttgactgagcagtttggaaaccctctttttgtatattctgcgaagtgaggttttgtagagcaaaactgcctattgtaaacaaggtaatatcttcagataaaaactggaaagaagcgttacaagaaactgctttctgatgtgtgcattcatctcacagagtgaactccattttttgatggaacagtttggaaacactctttttttagaatctgcaaatggatatttgggagtgcattgaggcctgtggtggaaaaggaaatatcttcagggaagaactagacagaagctatctgagaaactgctttgtgatgtgtgcattcatctcacagagttaaaactttcttttattgtgcagtttggaaacactgtttttgtattatctgcgaagggatatttgggagtgcattgaagcccactgttaaaaaggaaatatcttctgataaaaactagaaagaagctttttgagaaactgctttctaatgtgtactttcaactcacagagttaaaactgtttttgtttgagcagtttggacacaaggtttttgtagaatctgcaacgggatatttgggagtgcattgaagcctatggtgaagaaaaaaatatcttcagataaaaattagaaagaagctttttgagaaacttatgtgacttgtgcattcatctcacaacgataaacctttcttttgactaagcagtttggaaacaacgtttttgaaaaatctgccaagcaatattaggcaccattaaaaagactatagtgaacaaggaaatatcttcagataaaaactggaaagaagcgttatgagaaacagctttgtgttgtgcatgttcatgtgatgcagctaactccttctttatgtggaagagtttggaaacactggttttgtagaatctgcaaagggatatttgggagcatattgaggcctatggtggaaaaggaaatatcttcagagaagaaatagacataagttttctgagaaactgctttgtgatgtgtgcgttcatcttacagaattaaaactttctcttgattgagcagttttgaaacactatttctgtagaatctgtgaagggatatttgggagcacattgaagcctattttgaaaaaggaaatatctttggataaaaatgagaaggaagctttatgagaaactgctatatgatgtgtgcattcatcttacagatttaaacttttcttttgattgatcagtttggaaacactgtttaaagaggatctgcaaaggaatatttgggaatgcattgaagtatatggagacataggaaatatattcggataaaaactagaaagaagtaatttgagaaactgctttttgatgtacactctcatctcacagagttaaacctttcttttgattgatcagtttggaaacactgtttttgtagaatctgcaaagggatgcttgggagctcactgatgcctatggcataaagggaaatatcttcagaaaaaaactagaaagaacttgagaaactgttttctgatggatgcattcatcacacagagttaaactagtctttgactgagcagtttgggaacacggttttacaatcaattgcgaagcaatgttaggtagcgcataaaaggattatggtgaacaagaataatttcagagaaaaactggaaagaatcgttaaaagaaactgccttgtgatgtgcgcattcatctcacagttttaagtctttcttttgattgaacaatttggaaacactgtttctgtagattctgtgaagggatatttcagagtgcattgtggcctatggtggcaaaggaaatatcttcagagaagaactagacagaaactacctgagaaactgctttgtgatgtgtgcattcatctcacagagttaaactttttttttctttttgagcactttggaaacactctttttgtagaatctgtaaagggatatttgagagtacactgatgcctatagtgtaaaaggaaatatctttggataaaaactagaaagaagctttttgaggaactgctttttgatgtatgcattcatctcaaaaagctaaacttctcttttgacagagcagtttggaaacactgcttttgtataatctgtgaagtgatgctaggtagcataaaatagcttatggtgaacaagtaaataccttcagataaaaactggaaagaagcgttatgggaaactgctttctgatgtgtgctttcatctcacagagttcaatccttaatttaatggaacagttcggaaacacttttttttttcagagcacattgaggcctatgttggaaaaggaaatatcatcagagaagaactagacaagctatctgagaaacagctttgtgatgtgtgccttcatctcgcagagttaaacctctattttgattgagccttttggaaactgtttttgtataatatgcaaaggtatatttgggagctcgctgaagcctatggtgaaaaaggaaatatcttcagataaaaactaggaagaagctttttgagaaactgctttgtgatgtatgagttcaactcacagagttaagcttgttttctgatagagcagtttggaaacagtgtttttgtagaatctgtgaagggatatttaggagcacattgaagcctatgttgacataggaaatatctttggataaaaactagaaagaagctttttgagaaactgttttgtgaattgtgcatttgactcacagagatcaaactttcttttactgagcagtttggaaacactgttttatcaaaatctgtgaagcaatatcaggtagtgtaaaaaagcctatggtgaacaagaagacgtcttcagatgaaaactggaaagaagcgttacaagaaactgctttctgatgtgtgacctcatctcacagagttaagtccttcttttgatggaacagtttggaaactctgtatttgtagaatatgtgaagggatatttgggatcaaatttaagcctatggtgaaaaaggaaatgtcttcagttaaaaattggaaagcagtgttataaaaactggtttctcatgggtgcattcatctaacagagttaagtccttcttttgatggaataatttggaaacactgtttttgtagaatctgcaaaggggtatttgggagcatattgaggtctatggtggaaaaggaaatatcttctgagaagagctagacagaagctttctcagaaaatactttgtgatgtgtgaattcatctcatagagttaaaacttttttttgattaagcagtttggaaacactgtttttgcagaatctacgaagggatttttgggagcacattgaagcctatggtgaaaagggaaacatcttcaaataaaaactggaaagaagctttttcagaaactgttttgtgatgtgtgcattcatctcacagagataaaactttctttattttatcagtttggaaacactgtttttgtagtaactgcaaaaacgaatttgggagcccaagaggcctaaggtgaaaaaggaaataacttaagatgaaaactagaaagaagctttttgagaaaacagtttgtgatgtgtgcattattctcagagttaaacgtttcttttgactgagcagtttggaaacactgtttttgtagaatatgagaagggatgtttgggagtgcactgaggactatggtgaagaagaaaatatcttcggataaaaactagaaaaaagatatttgagaaactgctttgtgatgtttgcattcaactgacagaattaaaacttttttttgattgatctatttggagacacagtttttgtagaatctgtggagtgatattttgaagaatctgtgaagggatatttgggagcacatagagaagcctatggtgataaaaaatatctttggacataaactggaaagttttttgagaaacttgtttgtgatgtgtgcattcgtttcccatagttaaacaattcttttgactgagcagtttggaaacactgtttttgtgaaatctgtgaatcaatatttggtagcacaagaaagcctatgatgaaaagggaaatatctttaggcaaatatccagaaagaagcacaatgggaaactgctttctgatgtgtgcattcgtctcaaagagttaaatccttcttttgatggaagatttcagaaacactgtttatatagaatctatgagggaatatttgggagtgcattgaggcctgtggtggaaacggaaatatcttcagagaataacaagacagaagctttctgagaaactactttgtgatgtatgcattcaattcacagagttaaacctgttttttcattgagcagtttggaaacactgtttttttagaatctgtgatgggatatttgggaatgcattgaagcctatggtgatgaaggaaatatcatcagataaaaacgagaaagaagctttttgagaaacttctttttgatgtatgcatttgtctcacagagttaaacttttcttttgattgggcagtttggaaacactgtttttttagaatctgtgaaaggatgttaggtatcacaaaaaggccaatggtgaagaaggaaatatcttcagataaaaactggaaagaagcattatgagaaaatgctttctgctatgtgcattcatctcacagatttaaatccttctttcacaaggacagttaggaaacactgtgtttgtagaatctgcaaagggatattttgaagtgcagtgaggcctaatgtggaaaagaaagtatcttcagagacgaattagacagaagttatctcagaaactactttgtgatgtatgatttcctctcacagagttaaacttttcttttgattgatcagtttggaaacactgtttttgtagaatctgtgaagctatatttgggagcaccttcaaacctatggtgataaatcaaatatcttcggataaacactagaaaaaagttattgagaaattgctttgtgatgtgagcattcatcttgcagctttaaacatttcttttgactgagcagtttggaaacaccttttttgcaaaatctgtgaagtgaatttaggtagtgcagaaaagcctatggagaaaaagaaagtatcttcagataaaaagtgaaaagaaacgttatgagaaactgctttctgatgtgtaggataatctcaaagagttaaacttttcttttgattcagcagtttggaaacatggtttttgtagaatctgtgaagggatatttggcagcacatgggaacatatggtgaaaaaggaaatatctttggataataatgagaaagaagtttttgagaaactgacttgtgatatatacaatcatctaacagagttaaacttttctttgattgatcagtttggagacactatttttgtagaatatgcgatgtgacattggagagtgcatgaggcctatgttgaaaaaggaaataacttcagataaaaaccagaaagaagctttctgagaaactgcttagtgatgtgtgcattctcctcacagagttaaacgtttcttttattgagcagtttggaaacactgtttttgtagaatgtgcaaagggatatttgggagcacactgatgcctatggtgaaaaaggaaacatctttggataaaaactagacagaaggtttttgagaaacttctttgagatttgtgcatttagctcacagagttaaacttttctatagactgagcagtttggaaccactgtgtttgtgtaatctgtgaagcgatgtttggtagctcaaaaacacctatggtgaacaaggaaatatcttcagataaaaactggaaaaaaacatgataagaaagtgctttcttatgtatgcattcatctcacagagttatatccttcttttgatggaacagtttagaaacaatgttttttatagaatctgcaaagggttatttaggagtgtactgtgttctgtggtggaaaaggaaatatctttggagaagaactagaaagacgctttttgagaaactgctttgtgatatgtgcattcacctcacagcggtaaacttgtttttgattgagcagtttcaaaactctgtttttgtagaatctgcaaatggatatttgggagcacattgaggcctaaggtgataaacgaaatatcttaggataaaaactagaaagaagctttctaagaaactgatttgggatgtggactttcatctcacagatttaaacctttcttttaactgagcagtttggaaacgctgtttttgcaaaatttgtgaagtgatattaggtagtgcaaaaaagcctttggtgaaaaaggaaataaattcaaataaaaactggaaagaagcattaggagaaactgctttctgatgtgtgcattcagctcacagagttaagttctttttttgatggaatagtttggaaacgttgtttttgtagaatatatgaagggatatttgggagcactttgaggcctctggtgtaaaaggaaaaatcttcagagaagaactagacagaagctatctgagaaactgctttgtgatatgtgcattcatctaacaaagttaaaccattcttttgattgagcagttcggaaacactgtttttgtagaatctgcgacaggatatttgggagagcatggaagcctatggtgatcaaggaaatatgttcatataaaaacgagaaagaaacattttgagaaactgctgtgtgatgtgtgcattcatctcacagatttaaacctttcttttgattgagcagtttggaaacactgtttttacgaaatctgcaaagggatatttgggagcacactgatgcctatggtggaaaaggaaatatctttgtataaaaactagaaactttttgagaaactgctttgtgatgtatgtattcatctcacagaggtaaacttttcttttgaatgagcagtttgaaaacactggttttgtagaatctgcaaagagatagtggagtgcattgaggcctgtggtggaaaaggaaatatcttcagagaagaactagaaagaagctttctgagaaactgcttcatgatgtgtgcattcatctcacagagctaaagtttcttttggctgagcagtttggaaacactgtttctgaaaaatctgcaaagggatatttgggagcacactgatgcctattgtggaaaatgaaatatctttgtacaaaaactagaaagaaactttttgagaaactgctttgtgatgtatgtattcatctcacagaggtaaacttttcttttgactgagcagtttggaaacattgtttttctataatctgcaaagggatatttgggagcacattgaggcctgtggtggaaaaggaaatatcttcatagaagaactagacagaagctttctgagaaactgctttgtgatgtgtgcattcatctcacagagctaaagctttcttttgatggagcagtttggaaacaatgtttttgcaaaatctgcaaagggatattagggagcacactgaagcctatggtgaaaaatgaaatatctttggataaaaactagaaagaaactttttgagaaactgctttgtgatgtatgtattcttctcacagaggtaaacttttcttttgactgagcagtttggaaacactgtttttctataatctgcaaagggatatttgggagcacattgaggcctatggtggaaaaggaaatatcttcagagaagaactagacagaagctttctgagaaactgctttgtgatgtgtgcattcatctcacagagctaaagctttcttttgattgagcagtttggaaacactgtttttgtagaatctgtgaagggatatttgggaggtaattgaagcctgtggtgaaaaaggaaatatcttcagataaaaagtaaaaagaagctctttgagaaactgctttgtgattatcaggtgaaattcacccctgatatgtcacgtaggttcttttctattttccctaaatgtcagcccatctgagaaataaagggacggagtgcaagagagaaatttgaaagcttggtgtccggggtagacatcacattgctgcaggttctgtgatgggccacaagccacaaagccagcaagtttttactagtgattttcaaaaggggaaggagtatacggtagggtgtggatcacagagatctcaggcttcacaaagtaataagatatcacaaggtaaaaggaggtggggcaagattacaggacacaggactggagtgaatttaaaattgctaatgaagtttctggcttgcattgtcattgatatcatcttatcataaacagggtttgagagcagaaaactggtctgaccaaaatttattaggcgggaattttctcctcctaataagcctgggagagctacaggagactggggctcatttcatctctacagctgtgaccataaaagacagccacccccaaagcagccatttcagatgcctaccctcagggatgcattatctttctctgggatgtttcttgctgagaaaaagaattcagagatacttctcccatttgctttgaaagaagagaaatatggctctgttccaccaggctcaccaggagtctgagtttaaggttatctatcttcttccctgaacattgctgccaccctgttctttttccaaggtacccagatttcatagtgttcaaacacacatgctctacacacaatttgtgcagctaatgcaatcatcacaggatcctgaggtgacatatatcctcctcactctctagtgagatgaacccagtaccacagatggaaatgcagaaatcacctgtcttctgcgtcgctcatgctgggagctgtagaccagagctgttcctatttggccatcttggctcctcccctgaacctttcttttgattcagctgtttggaaacactctttttgtagattccacaagtggatatttggagcgctttgaggcctattgtggaaaaggaaatatcttcacataaaaactacatggaacatcctgagaaactgctttgtgatgtgtgcattcatctcacagagttgaaaatttcttttcattgagcagttttgaaacactttttctgtagaatctgcaaggggatatttggtgccattttaggcctattgtggataaggaaacatcttcacataaaaactgcacagatgcattctgagaaacttctttgtgatgtgtgcattaatgtcttagagttgaagctttcttttcattgagcagtttggaaacactctttttgaaggatctgcaagtggatatttggaacgctttgaggcctatggtggaaaaggaaatatcttcacataaaaactacactgaagcattctgagaaacttctttgtgtcgagtgcattcaactcacagagttggaactatattttgatagagcagttttgaaactctctttttgtagaatctgtacgtgggtatgtggagttgtttgtggctaatggtggaaaaggaaatatcttctcataaaaactacacagaagctttctgagaaacttctttgtgatgtgtgcattcatctcacagggttgaaactttcttttgattgagctgttttgaaacactctttttgtagaatatgcaggtggatatttggagcactttgaggcatattgtggaaaaggaaatatcttcacatacaaagtacgtggaagtattctgagaaacttctttgtgatgtgtgccttcatctcacagagttgaacatttctctgagctgtttggaaacactctttttgaagaatgtgcaagtggacatttggatcactttgaggcctatggtggaaaaggaaatatcttaaaataaaaattacaaagaagtgttctgtgaaacttctttatgatgtgtgcattaaactcacagtgttgaacctatcttttgagtgagcagtttggaaacactctttttgtagaatctgcaagtggatatttggagcgctttggggtctattgtggaaaaggaaatatcttcacataaaaactgcacagaagcattctgagaaactgctttgtgatgtgtgcattaatctcacagagttgaacatttcctttgatggagcagttttgaaacactctttttgtagaatctgtaaggggatatttggagtgcttttaggcctaatgtgtataaggaaatatcttcacataaaagatacacacatgctttttgagaaacttctttgtgatgtgtgcattagtctcacagagttgaggctttcttttgattgagcagtttggaaacactctttttgtgggatctgcaagtggatatttggaacactttgaggcctatgatggaaaaggaaatatcttcacataaaaactacacagaagcattctgagaaactactttgtgatgtgtgcattcaactcacagagttgaacctatcttttgatggagcagttttgaaactctctttttgtagaatctgcaagtgggtatttggagcctttctggccaaaggtggaaaaggaaatatgttcacataaaaactacacagaagccctctgagaaacttctttgtgatgtgtgaattcatctgccagagttgaccctttctgttgaatgagctgttatgaaccactttttttttgtagaatatgcaggtggatatttggaacattttgaggcctaaggtggtaaaggaaatatatacaaataaaaactatacagaagaattctgagaatcttctttttgatgtgtgcattcaattcacagggttgaacctatcttttgatggagcagttttgaaactcactttttgtacaatctgcaagtgaatatttgcagcactttgaggcctatggtggaaagagaaatatcttcacataaaaactacacagaagcattctgtgaaacttctttgtgatgtgtgcattcatctgacagagttgaacttttcttttgattgagcagtttggaagcactctttttgtagaatctgcaagtggatatttggagtcctttgaggcctattgtggaaaaaaaatcttcacataaaatctacacggaagcattctgagaaactgctttgtgatgtatgcattcatctcagagagttgagcattatttggatttagcagttttgaaacactccttttgtagtatctgcaagtggatatttggatctctttgaggactaagtttgaaatggaaatatctccacataaaaaccacacagaagcattatgagaaaataatttgcaatgtgtgcattcatctaacagagttgaacatttcttttgattgagcagttttgaaacactcttttagtagcaactgcaagtggatatttggagtgctttgaggactattgtggaaaaggaaatatcttcacataaaaactacacagaagcatcctgagaaagaactttgcaatgtgtgcattcatctcaaagtgttgaaacattcttttgattgagcagtttggaaaaactctttttgtaggatctgcatatggatatttggaacgttttgaggcataaggtggaaaaggaaatatcttcaaataaaaactacacagaagaattccgagaaacttctttgtgatatgtgcgttcatctcacagagttgaacccttgttttgattgagcagttttgaaacaatctctatgtagaatctgcaggtgtatatttggactgctctgaggcctgttgtggaaaaggaagtatcttcacataaaaactacatagaaatattctaagaaacttctttgtgttgtgtgcactcatctcacagagttcagtctttcttttgattgagctgttttgaaacactcttgttgtagaatgtacaggtggaaatttggatcgctctgaggtgtattgtggaaaaggaaatatcttcacataaaaactacatagaaacattttgagaaacttcttttcaatgtgtgcattcatcacacagagttgaatttcttttgattgagcagtttggaaacactctttttgaaggatatgcaagtggatatttggatcactttgaggcctatggtggaaaaggaaataacttcacataaaatctacacagaagcgttctgagaaactactttgtggtgtgtgcactcatctcacagagttgaacctttcttttgattgagcacttttgaacaccctttttgtagaatctgcaagtggatatttagaattctttgtggactattgtggaaaaggaaatatcttcacttaaaaactacacagaatactgagaaacttatttgtgatgtgtgcattcatctcaaagtattgaagatttcttttgattgagcagtttggaaaattctttttgaagaatctgaaagtggatatctggagccatttgaggcctaaggtggaaaaggaaatatcttcacacaaccactacacagaagcattctgggaaagttctttctgaagtgtgcattcatctcacaggtttgaacgtttcttttgattgtgtagttttgaaacactcttttctagaatctgcaggtggattttctgactgctttgaggcttattgtagaaaaggaaatatcttcatataaagactatacagaagcattctgataaacttctttgtgatgtgtgtgttcatctcacattgtttaacctttcttttgattgagcagttttgaaacacgtttttgcagattctgcaagtggatatttggagtgcattgaggcctattgtggaaaaggaaatattttcacacaaaaactacacagaagcattcagagaaacttctttgtgatgagtgcattcaactcacagagttgaaaatctcttttgattgaggaattttgaaactctctttttgtcgaatctgcaagtggatatttggagcactttgaggtctatggttgaaaaggaaatatcttcacataaaaactacacagaagaattctaatgaacttctatgtgatgtgttcattcaactcacagagttcaacctatctgttgatagagctgtttacgaactctctttttgtagaatataaaatggatattttgagtgctttgcagcctatagtggaaaaggaaatatcttcacataaaaattacacagaaacattctgagaaacatcttcgtgatgtatgcattgatctcacagagttgaacatttcctttaattcagcagttttgaaacactctttttgtagaatctacatgtggatatttggagagctgtgagggctattgagaaaaggaaatatcttcacataaaaactacacagaaggattctgagaaacctctttgcgatgtgtgcattcatctcacagaggtgaacatttcttttgatagagtaactttgaaacattcttttttgaataatctgcaagtagatatttggtgcgctttgagccctattgtggaaaaggaaatatcttcacacaaaaactacaaagaagcattcttagaaagtaattggtgatgcgtgcattcaactcacagaggtgaaactatcctttgattgagcagttttgaatctcactttttggaatatctgcaagtggatgtttggagcccttggtggcctatgatggaaaaggaaatatcttcacacaaaaactacacagaagtattctgataaatttctttgtgatgtgtgcattattctaacagagttgaaactttctttgagcagttttgagacaatctttttgtagaatctgcaggtggatatttggagtgctttgaggtctattgtggaaaaggaaatatcttcacataaaagctacacagaagcattctgagaaactcctttgtgaagtgtactttcacttcagagagctgaagctttcttttgattgtgcagttttgaaactctctttttgtagaatcagcaagtggatatttggagccatttgcagcctacggtggaaaacaaaatatctccacataaaaactacacaaaaaaatacagagaaagttctttgtgatgtgtgtattcatctaacagagttgaaagtttcttttgattgagcagtttggaaacactctttttgtagaatctgcaagtggatatttggagcgctttgaggcatattttggaaaaggaaatatcttcacataaaaactacccagaagctttctgagagccatctttgtgatgtgtgcattcatttcacagaattgaaccgttcttttgattgagcagttttgaaacactctttttgtagaatctgcaagtggatatttggagcaccttgcggcctatggtgcaaaaggaaatattttcacataaaaactacacagaagtattctgagaaacttctctgtgatgtgtgcattcatctcagagagttgatactttcttttgatttagcagtttgaaacactctttttgtagaatttgcaagtggatatttggagcgctttgtggcctattgtggaaagggaaaaattttcacataaaaagtgcacagaagcattctgaggaacttctttttgatctgtgcattcatctgaaagagttgaacctttcttttgattgagcagttttgaaacactctttttgtagaatctgcatggggatatatggagcactttgacctactgtggaaaaggaaatatcttcacataaaaactacacagaagcattctgagaaacatctttgggatgtgtacattcaactcacagagttaaacctaccttttgatagagcagaaactctctttttgtagaatctgcaagtggacttttggagcctttggggccaatggtggaaaaggaaatatcttcacataaaaactacacaaaatcattctgagaaacttctttgcaaagtgtgcattcatctcagggaattgaatgtttcttttgattgagcagtttgtaaacactctttttgtagaatctacaaatgtatatttggagcgctttgaggcctattgtggaaagggaaatatcttcacataaaaactacacagaattattctgagaagcttctttgtgatgtgtgcattcatctcacagagttgaaagtttcctttgattgagcagtttggaaacactgttttcgtagaacctgcaagtggatatttggagggccttgaggcgtattgtggaaaaggaaatatcttcacctaaaaactacacagaagcattctgagaaacttctttttgatgtgtgcattcatatcagagaggtgaaactttctttgattgagcagttttgaaactctctttttgtagaatctgcaagtggatatttggaacgctttgaggcatattgtaaaaggaaatatcttcacataaaaacaacaaaaaatcattctgggaggggaggagccaagatggccgaatagtaacagctctggtctacagctcccagcgtgagtgatgcagaagatgggtgatttctgcatttccatctgaggtaatgggttcatatcactagggagtgccagacagtgggtgcaggacagtgggtgcacacactgtgcgcaagccgaagcagggcgaggcattgcctcacttgggaagtgcaaggggtcagggagttccctttctgagtcaaagaaaggggtgacagaagaacctggaaaatcgggtcactcccacctgaatactgggcttttctgaccggtttaaaaaatggcacatcaggagattatatcctgcacctggcttggagggtcctatgcccacggagttttgttaattgctagcacagcagtctgagatcaaactgcaaggtggcagtgaggctgggggaggggcgcccaccattgcccaggcttgcttaggtaaacaaagcagctgggaagctcgaactgggtggagccctccacagctcaaggaggcctgcctgtctctgtaggctccacctctggggacagggaacagacaaacaaaaagacagcagtaacctcggcagacttaaatgtccctgtctgacagctttgaagagagcagtggttctcccaacacacagctgaagatatgagaatgggcagactgcctcctcaagtgggtccctgaccgctgacacccaagcagcctaactgggaggcactgcccagcaggggcacactgacacctcacatggcagggtattccagcagacctgaagctgagggtcctgtctgttaaaaggaaaactaacaaacagaaaggacatccacaccaaaacccatctgtacatcaccgtcatcaaagaccaaaagtagataaaaccacaaagatggggaaaaaacagaacagaaaaactggaaactctaaaaagcagagcgcctctcctcctccaaaggaatgcagttcctcaccagcaacggaacaaagctggatggagaatgactttgacgagttgagagaagaaggcttcagatgatcaaattactctgagctatgggaggacattcaaaccaaaggcaaagaagttgaaaactttgaaaaaaatttagaagaatgtataactagaataaccaatacagaggagtgcttaaaggagcagatggagctgaaaaccaaggcttgagaactatgtgaagaatgcagaagcctcaggagctgatgtgatcaactgcaagaagggtatcagcaatgaaagatgaaatgaatgaaatgaagcgagaagggaagtttagagaaaaaagaataaaaagaaatgagcaaagcctccaagaaatatgcgactatgtgaaaagaccaaatctacgtctgattggtgtacctgaaagtgacggggaggatggaaccaagttggaaaacactctgcaggatattatccaggagaacttctccaatctagcaaggcaggccaacgttcagattaaggaaatacagagaacgacacaaagatactcctcgagaagagcaactccaagacatataactgtcagattcaccaaagttgaaatgaaggaaaaaatgttaagggcagccagagagaaaggtggggctaccctcaaagggaagcccatcagactaacagtggatctctgggcagaaaccctacaagccagaagagagtgggggccaatattcaacattcttaaagaaaagaattttcaacccagaatttcatatccagccaaacgaagcttcgtgagtgaaggagaaataaaataatttacagacaagcaaatgctgagagattttgtcaccaccaggcctgccataaaagagctcctgaaggaagcgctaaacatggaaaggaacaactggtaccagccactgcaaaatcatgccaaaatgtaaagaccatcgagactaggaagaaactgcatcaactaacgagcaaaatcaccaactaacatcataatgacaggatcaaattcacacataacaatattaactttaaatgtaaatggactaaatgctccaattaaaagacacagactggcaaattggataaagagtcaagacccatcagagtgctgtattcaggaaacccatctcacgtgcagagacacacataggctcaaaataaaaggatggaggaagatctaccaagcaaatggaaaacaaaaaaaggcaggggttgcaatcctagtctctgataaaacagactttaaaccaacaaagatcaaaagagacaaagaaggccattacataatggtaaagggatcaattcaaaaagaagagctaactatcctaaatgtatatgcacccaatacaggagcacccagattcataaagcaagtcctgagtgacctacaaagagacttagactcccacacctaaataatgggagactttaacaccccactgtcaacattagacagatcaacgagacagaaagtcaacaaggatacccaggaattgaactcagctctgcaccaagcagacctaatagacatctatggaaaagaacagaaattataacaaattatctctcagaccacagtgcaaacaaactagaactcaggattaagaatatcactcaaaaccgctcaactacatggaaactgaacaacctgctcctgaatgactactgggtacataacgaaatgaaggcagaaataaagatgttctttgaagccaacgagaacaaagacacaacataccagaatatctgggacacattcaaagcagtgtgtagaggaaaatttatagcactaaatgcccacaagaaaaagcaggaaagatccaaaattgacacccgaacaccacaattaaaagaactagaaaaggaagagcaagcacattcaaaagctagcagaaggcaagaaataactaaaatcagagcagaactgaaggaaatagagacacaaaaaacccttcaaaaaattaacgaatccaggagctgtttttttgaaaggatcaacaaaattgatagaccgctagcaagactaataaagaaaaaaagagggaagaatcaaatagatgcaataaaaaatgataaaggggatatgaccaccgatcccacagaaatacaaactaccatcagagaatactacaaacacctctacacaaacaaactagaaaatctagaagaaatggataaattcctcgacacatacactctcccaagactaaaccaggaagaagttgaatctctgaatagaccaataacaggatctgaaattgtggcaataatcaatagcttaccaaccaagaagagtccaggaccagatgtattcacagccgaattctaccagaggtacaaggaggagctggtaccattccttccgaaactattccaatcaatagaaaaagagggaatcctccctaactcattttatgaggccagcatcattctgataccaaagccgggcagagacgccaccaaaaaagagaattttagaccaatatccttcatgaacattgatgcaaaaatcctcaataaaatactggcaaaacgaatccagcagcatatcaaaaagcttatccaccatgatcaagtgggcttcatccttgggatgcaaggctggttcaatatactcaaatcaaaaaatgtaatccagcaattacacagagccaaagacaaaaaccacatgattatctcaatagatgcagaaaaagcctttgacaaaattgaacaacccttcatgctaaaaactctcaacaaattaggtattgatgggacatatttcaaaataataagagctatctatgacaaaaccacagccaatatcatactgaatgggccaaaactggaagcattccctttgaaaactggcacaagacagggatgccttctctcaccactcctattcaacatagtgttggaagttctggccagggcaattaggcagaagaaggaaataaagggtattcaattaggaaaagaagaagtcaaattgtccctgtttgcagacgacatgattgtatatctagaaaaccccattgactcagcccaaaatctccttaagctgataagcaacttcagcaaagtctcaggatacaaaatcaatgtacaaaaatcacaagctttcttatacaccaacaacagacaaacagagagccaaatcatgagtgaactcccattcacaattgcttcaaagagaataaaatacctaggaattcaagttacaagggatgtgaaggacctcttcaaggagaactacaaaccgctgctcaatgaaatgaaagaggatacaaacaaatggaagaacattccatgctcacggataggaggaatcaatatcgtgaaaatggccatactgatcaaggtaatttatagattcaatgccatccccatcaagctaccaatgcctttcttcacagaattggaaaaaactactttaaagttcatatggaaccaaaaaagagcccacatagccacgtcaatcctaaggcaaaagaacaaagctggaggcatcacactacctgacttcaaactatactacaaggctacagtaaccaaaacagcatggtactggtaccaaaacacagatatagatcaatggaacagaacagaaccctcagaaataatgccgcatatctacaactatctgatctttgacaaacctgagaaaaacaagcaatggggaaaggattccctgtttaataaatggtgctgggaaaactggctagccatatgtagaaagctgaaactggatcccttccttacatcttatacaaaaatcaattcaagatggattaaagacttaaacgttagacctaaaaccataaaaaccctagaagaaaacctaggcgataccattcaggacataggcatgggcaaggacttcatgtctaaaacaccaaaaacaatggcaacaaaagacaaaattgacaaatgggatctaattaaactaaagagcttctgcacagcaaaaaaaaaactaccatcagagtgaacaggcaccctacaaaatgggagaaaattttcgcaacctactcatctgaaaaagggctaatatccagaatctacaatgaactcaaacaaatttacaagaaaaaaacaaacaaccccatccaaaagtgggcaaagaacatgaacagacacttctcaaaagaagacatttatgcagccaaaaaacacatgaaaaaatgctcatcatcactggccatcagagaaatgcaaatcaatccacaatgagataccatctcacaccagttagaatggcaatcattaaaaagtcaggaaagaacaggtgctggagaggatgtggagaaataggaacacttttacactgttggtgggactgtcaactagttcaaccattgtggaagtcagtgtggcgattcctcagggatctagaactagaaataccacgtgtcccagccatcccattactggatatgtactgaaaggactataaatcatgctgctatagagacacatgcacacgtatgtttactgaggcattattcacaataggaaagacttggaaccaacccaaatgtccaacaatgatagactggattgagaaaatgtggcccatatacaccatggaatactatgcagccataaaaatgatgagttcatgtcctttgtagggacatggatgaaattggaaatcatcattctcagtaaactatcgcaagaacaaaaaaccaaacaccgcatattctcactcataggtgggaattgaacaatgagatcacatggacacaggaaggttactatcacactctggggactgttgtggggtgggggcggggggaggggtagcattgggagatatacctaatgctagatgacgagttagtggttgcagcgcaccagcatgacacacatgtatacatatgtaactaacttgcacaatgtgcacatgtaccctaaaacttaaagtataataaaaaaaaaatcattctgaggaacttctttgtgatgtgtgcattcatatcagagaattgaacgtttcttttgattgagcagtttggaaatactctttttgtccaaactacaggtggatatttggatcgctttgaggcctattgtggaaagggaaatatcttcacataaaaactacacagaagatttctgagaaacttatttgctatgtgtgcattcaactctcagtgttgaacctatctttgaatgagcagttttgaaactccctttttggaaaatctgcaaatcgatatttggacccatttgcagcttatggtggaaaaggaaatatcttcaattaaaaactacaccgaagcattcttagaaaattctttgtggtgtgtgcattcatgtcacagagttgaaactttcttttgatagagcagttttgaaacactctttttgtagaaactacaggtggatatttggagcgctttgaggcctattgtggaaagggaaatatcttcacataaaaactacacagaagcattctgagaacgttctttgtgatgtgtgccttcaactctcagtgttgaacctatctttgattgagcagttttgaaactccctttctggaaaatctgcaaatggatacttggagccgtttgcagcctatggtggaaaaggaaatatattcaaataaaaactacacagaagcattctgagaaaattctttgtggtgtgtgcattcatgtcacagagttgaaactttcttttgattgagcagttttgaaatattctttttgtagagtctgcatgtggatatttggagtgctttgaggccaatggtggaaaaggaaatatcttcacagaaaaaatacgcagaataattctgagaaattacttagtgatgtgtgcatacatctcacagagttgaaaccttcttttgattgagcagttttgaaacactctttttattgaatctgcaagtggatatttggagtgctttgaggcctatggtggaaaaggaaatatcttcacataaaaactactcaaaaacattctgagaaacttctttgtgatatgtgcatttatctcacagagttgaggatttcttttgattgagcggtttggaaacttctttttgaagaatctgcaagtggatatttggagcgctttgagtcctatcgtggaaaaggtaatatcttcacataaaaagtacatagaagcattctgtgaaacttgtttttgatgtgtgcattgcactcacgtaggtgaacctatcttttcattgagcagttttgaaacactctttttgtggattccacaagtggatgtttggagcgttttgaaggttaagctggaaaaggaactatcttcacataaaaactatacagaagctttctgagaaacttctttgtgatgtgtgcaatcaactcacagatttaaacccatcttctgattgagcagttttgaaagtctctttttgtagaatctgcaagtggatatttggaaccgtttgtggcctatgggggaaaaggaaatatcttcacataaaaactacacagaagcattttgaaaaacttctttgtgatgtgtgcattcatctcacatagttgaaccttatttttgattgaacagttttgaaacttctttttgttgaatctgcaagtggatatttggagctatttgtggcctatggttgaaaaggatatatgttcacataaaagctatagagaagaattctgagaaacttctttgtgacgtgtgcagtcaactcacagagttgaacctatcttttgaaagagcagtttgaaacactctttttgtagaatctgcaagtggatatttggagccttttgcatcctatagtggaaaaggaaatattttcacatagaaactacacagaatcattctgagaaacttctttgtgatgtgtgcattcatctcacagagctgaacctttcttttgattgagcagttttgaaacactctttttgtagattctgtaagtagatatttggagtgctttgaagcctattgtggaaaaggaaatatcttcacataaacactacaaagaggcatgctgagaaacttctttgcgatgtgagcattcatctcacagaggtgatcctttcttttgtttgagcagtggggaaactctctttttttagaatctgcaagtggatatttggagcgctttgaggcctattcaggaaaagggaacatcttcacacaaaaactacaaagaaacattctgagaaactactttgtgatgtgtgcattcatctcacagagttgaacttttcttttgattgagcagttttgaaaatctctttttatggaatctgcaagtggatatttggagtgctttgaggcgaattgtggaaaaggaaatatgttcacataaacactacacagaagcattctgagaaacgtcttcgtgacatgggccttcatctcagagagttgaacctttcttttgattgagcagttttgaaactctctttttgtagagtctacaagtggatatttggagacatttgtggcctatggtggaaaaggaaatatcttcacataacaactacacagaagcattctgggaaacttcattttgatgtgtgcaatcaactcacagatttgaaattatcttttaattgagcagtttgaaactctctttttgtagaatctgcaagtggatatgtggagccatttgcagtctatggtggaaaaggaaatatcttcacatagaaactacacagaagcattgtgagaaactactttgtgttgtgtgtaatctactcacagagttgaacatatcttttgattgagcagctttgaaactctctttttgtagaatctgtaagtggatatttggagccttttgtggcctatggtggaaaaggaaatatctacaaattaaaactacacagaagcattctgagaaacttctttgtgatgtgagcattcatctcacagagttgaatctttcttttgattgagcagtttgaaaatgctctttttgtagaatctgcaagtggatatttggagtgccttgaggcctattgtggaaaagggaaacatcttcacataaaaactacacagaagtaatctgataaacttctttgtgatgtgtgcattcatctcacagagttgaacctttatttttattgagcagtttggaagaactctttttgtacattctgcaagtagatattctttgtgatgtgtgcattcaactcacagagttgaaagtatcttttgattgagtagttttgaaacagtctttttgtagaatctgcaagtggatatttggagtgctttgaggcctgtggtggaaaacgaaatatcttctcatcaaaaatacacagaagcatattgagaaaattcttgtgatgtgtgcattcatctcacagagttgaatctttcttttgattgagcaattttgaaacactcgttttgtagaatctgcaagtggatatttggagcgccttgaggcctgttgtggaaaagggaaacatcttcacataaaaactacacagaagtaatctgagaaacttctttgtgatgtgtgcattcatctcacagagttgaatctttattttgattgagcagtttggaagaacttttttgtacattctgcaagtggatatttggagtgctttgaggcctattctggaaaaggaaatatcttcacacaaaaactacacagaagcattctgagaaacttctctgtgatgtgtgcattcaactcacagagttgaaagtgtcttttgattgagtagttttgaaacagtctttttgtagaatctgcaagtggatatttggagtgctttgaggcctatggtggaaaaggaaatatcttctcatcaaaaatacacagaagcgtactgagaaaattcttgtgatgtgtgcattcatctcacagagttgaatctttcttaagattgagcaattttgaaacactcgttttgcagaatctgcaagtggatatttggagcgctttgaggcctattttggaaaaggaaatgtcttcacatagaaactacacagatgcattctgagaaacttctttgcaaagtgtgcgttcatctcagagagttgaagctttcttttgattgagtcgttctgaaactctctgtatgtcgaatctgcaagtggatatgtggagccttttgtgggctatggtgcaaatgaaaatatcttcacatgaaagctacaaagaagcattgtgacaaaattctttgtgatatgtgtattcacctcacagagttgaacacttcttttgattgagcagtttgaaaacactcttttgtagaatctgcaagttgatatttagagagctttgaggcctattttggaaaacgaattatcttcacataaaaactacacagaagaattctgagaaacttctttgtgatgtgtgcattcatctcacagagttgaaccttccttttgattgagcagttttgaaacactctttttgtagaatcttcaactgtatatttggagagctttgaagcctctggtggaaaaggaaatatcttacaataaaaacaacacagaagcattctgatgaacttctttgtgatgtcttcattcatctcacagagttgaaaatttcttttgattcagtagttttgaaacactccttttgtagaatctgcaagtggatatttggagttctttggggcctattgtggaaaacgaaatatcttcacataaaaactatacagaagcattctgagaaacttctttgtgatgagtgtattcaactcaccgagttgaacctatcttttgatggaacagttctgcacctctctttttgtagaatctgaaagtggatattttgagccctttgcggcatatggtggaaaaggaaatatctactcataaaaactacacaaaagaaatctgagaaatttctttgggttgtttgcattcatctcacagagttgaaactttcttttgtttgagaagtttgtaaacactaatttgtagaatctgaaagtggatatttggagtgctttggggcctactgtggaaaaggaaatatcttcacctaaaaactacatagacgcattctgagaaacttctttgtgatgtgtggattcatcttactgagttgatccattcttttgattaagcagtttgaaaacactctttttgtagaatctgcaaatggatattttcggttctttgatgtctatggtggaaaaggaaatatcttcacataaaaaatacacagaagcattctgggaaacttcattgtgatgtgtgcattcaactaacagagttgaacgtatcttttgattgagaagttttgaaactcactttttatacaatctgcaattggatatttggagacctttgcggcctatgttggaaaaggaaatatcttcacataaaaactgcacagaagctttctgagaaacttctttgtgatgtgtgcattcaactcacagacttgtacctatcttttgattgagcaattttgaatctctctctttgtagaatctgcaagtggatatttggagccccttgcggtctacggtggaaaaggaaatatcttcatataaaaaatacacagaagcattctgagaaaattctttgtgatcagtgcattcttctcacagagttgagcttttctttctattgagtattttgaaaaactctttttgtacagtcagcaagtggataattgtagtgctttgaggtctattgtggaaaaggaaatatcttcacataaagactacacagaaacagtctgagaaacttctttgtgatttgtgttttcatgtcatagagttgaaactttcttttgattgagcagtttggaaacactctttttgtataatctgcaagtgaatgtttggagtgcattgaggcctatggtgtaaaaggaaatatcttcacataaaaattacacagaagctatctgagaaatttctttgtgatgtgtgtattcatctcacagagttgaattttttttttcttttattattatactttaagttttagggtacatgtgcacactgtggagattagttacatatgtatacatgtgccatgctcgtgcactgcacccactaactcgtcatctagcattaggtatatcttccaatactatccctcccccctacccccaccccacaacagtccccagagtgtgatgttccccttcctgtgtccatgtgatctcattgttcaattctcacctatgagtgagaatatgcggtgtttggtttcttgttcttgcgatagtttactgagaatgatgatttccaatttcatctatgtccctacaaaggacatgaactcatcactttttatggctgcatagtattccatggtgtatatgggccacattttcttaatccagtctatcattgttggacatttgggttggttccaagtctttgctattgtgaatagtgctgcaataaacatacgtgtgcatgtgtctttatagcagcatgatttatagtcttttgggtatatacccagtaatgggatggctgggtcaaatggtatttctagttctagatccctgaggaatcgccacactgacttccacaatggttgaactagtttacagtcccaccaacagtgtaaaagtgtttctatttctccacatcctctccagcacctgttgtttcctgactttttaatgatcaccattctaactggtgtgagatggtatctcattgtggttttgatttgcatttctctgatggccagtgatgatgagcattttttcatgtgttttttggctgcataaatgtcttcttttgagaagtgtctattcatgtcctttgcccacttttggatggggttgtttgtttttttcttgtaaatctgtttgagttcattgtagattctggatattagccctttgtccgatgagtaggttgcaaaaattttctcccatgttgtaggttgcctgttcactctgatggtagtttcttttactctacagaagctctttagtttaattagatcccatttgtcaattttgtcttttgttgccattgcttttggtgttttagacatgaagtccttgcccatgcctatgtcctgaatggtattgcctaggttttcttctagggtttttatggttttaggtctaatgtttaagtctttaatccatcttgaattgatttttgtataagatgtaaggaaaggatctagtttcagctttctacatatggctagccagtttccccagcaccatttattaaatagggaatcctttccccattgcttgtttttctcaggtttgtcaaagatcagatagttgtagatatgtggtgttatttctgagggctctgttctcttccattgatctgtatctctgttttggtaccagtaccatgctgttttggatactgtagccttgtagtatagtttgaagtcaggtagtgtgatgcctccagctttgttcttttggcttaggattgacttggcgatgtgggctcttttttggttccatatagactttaaagtagttttttccaattctgtgaagaatggcattggtagcttgatggggatggcattgaatctgtaaattaccttgggcagtatggccattttcacgatattgattcttcctacccatgagcatggaatgttcttccatttgtttgtatcctcttttatttcattgagcagtggtttgtagttctccttgaagaggtccttcacatccctggttattgggattcctaagtattttattctctttgaagaaattgtgaatgggatttcactcatgatttggctctctgtttgtctgttgtcagtgtataagaatgcttgtgatttttgtacattgattttgtatcctgagactttgctgaagttgcttatcagcttaaggagattttgggctgagtcaatggggttttctagatatacaatcatgtcgcctgcaaacagggacaatttgacttcctcttttcctaattgaataccctttatttccttctcctgcctaattgccctggccagaacttccaacactatgttgaataggagtggtgagagagggcatccctgtcttgtgccagttttcaaagggaatgcttccagttttggcccattcagtatgatattggctgtgggtttgtcataattagctcttattattttgagatatgtcccatcaatacctaatttattgagagtttttagcatgaaatgttgttgaattgtgtcaaaggccttttctgcatctattgagataattatttagtttttgtctttggttgtttatatgctggattacatttattgatttgcatatattgaaccagccttgcatcccagggatgaagcccacttgatcatggtggatgagctttttgatgtgttgctggattcggtttgccagtattttattgaggatttttgcatcaatgttcatcaaggatattggtctaaaattctcttttttcattgtgtctctgcctggctttggtatcagaatgatgctggcctcataaaatgagttagggaggattccctctttttctattgattggaatagtttcagaaggaatggtaccagctcctccttgtacctctggtagaattcggctgtgaatccatctggtcctggactctttttggttggtaagctattgattattgccacaatttcagatcctgttattggtctattcagagattcaacttcttcctggtttagtcttgggagagtgtatgtgtcgaggaatttatccatttcttctagattttctagtttatttgtgtagaggtgtttttagtattctctgatggtagtttgtatttctgtgggattggtggtgatatcccctttatcagtttttattgcatctatttgattcttccctctttttttctttattagtcttgctagcagtctatcaattttgttgatcctttcaaaaaaccagctcctggattcattaattttttgaagggtttttttgtgtctctatttccttcagttctgctctgattttagttatttcttgccttctgctaccttttgaatgtgtttgctcttgcttttctagttcttttaattgtggtgttagggtgtcaattttggatctttcctgctttttcttgtgggcatttagtgctataaatttacctctacacactgctttgaatgtgtcccagagattctggtatgttgtgtctttgttctcgttggtttcaaagaacatctttatttctgccttcatttcgttatgtacccagtagtcattcaggagcaggttgttcagtttccatgtagttgagcggttttgagtgagattcttaatcctgagttctagtttgattgcactgtggtctgagagatagtttgttataatttcttttcttttccatttgctgaggagagctttacttccaagtatgtggtcaattttggaataggtgtggtgtggtgctgaaaaaaatgtatattctgttgatttggggtggagagttttgtagatttctattaggtctgcttggtgcagagctgagttcaattcctgggtatccttgttgactttctgtctcgttgatctgtctaatgttgacagtggggtgttaaagtctcccattattaaggtgtgggagtctaagcctctttgtaagtcactcaggacttgctttatgaatctgggtgctcctgtattgggtgcatatatatttaggatagttagctcttctttttgaattgatccctttaccattatgtaatggccttctttgtctcttttgatctttgttggtttaaagtctgttttatcagagactaggattgcaacccctgcctttttttgttttccatttgcttggtagatcttcttccatccttttattttgagcctatgtgtgtctctgcatgtgagatgggtttcctgaatacagcaccctgatctgtcttgactctttatccaatttgccagtctgtgtcttttaattggagcatttagtccatttacatttaaagttaattttattatgtatgaatttgatcctgttatgatgatgttagctggttattttgctcattagttgatgcagtttcttcctagtcttgatggtctttacattttggcatgattttgcagcggctggtgctggttgttcctttccatgtttagcgcttccttcaggagctcttttatggcagacctggtggtgacaaaatctctcagcatttgcttgtctgtaaaggattttatttctccttcagttatgatgcttagtttggttgggtatgaaattatggtttgaaaattcttttctttaagaatgttgaatatttgtccccactctcttcaggcttgtagggtttctgccgagagatctgctgttagtctgattggcttccctttgagcataacccgacttttctctctggctgcccttaacattttttcgttatttcaactttggtgaatctgacaattgtgtgtcttggagttgctcttctcgatgagtatctttgtggtgttctctgtatttccttaatctgaacgttggcctgccttgctagattggggcagttctcctggatagtatcttgcagagtgttttccaacttgattccattctccccgtcactttcaggtacaccaatcagacgtagatttggtcttttcacatagtcccatatttcttggaggctttgctcatttctttttattcttttttctctaaacttcccttctcacttcatttcattcatttcattttccattgctggtaccctttcttccagttgatcacatcggctcctgaggcttctgcattcttgacgtagttcttgagcattggttttcagctccatcagctcctttaagtacttctctgtattggttattctagttttacattcttctaaatttttttcaaagttttcaacttctttgcctttggtttgaatgtcctcccatagctcagagtaatttgatcttctgaagccttcttctttcagctcttcaaagtcgttctccgtccagctttgttccgttgctggtgaggaactgcattcctttgaaggaggagaggcgctctcagagttgaatttttcttttgactgtggagtttggaaacactctgtttgtagaatctgcaaggggatatttggagacctttgttgccttttgtggaaaaggaatatcttcagataaaaactacacagaagcattctgatgaatttctttgtgatgtgtgcattcatctcacagagttgaactttgtttggactcagtagttttgaaacactctttatgtagaatctgcaagtggatatttgtagcgctttgggtccttttgtggaaaaggaaatatcttcacctaaaaactacacagaagcattctgagaaacttctttgtgatgtgtgcattcttctcatggagctaaacctttctttttattgagcaatttggaaacactctttttgtagaatctgcaagtggtcactttgagcactttcaggcctatggtggaaaagaaaatatcttcacatataaactacacagaaacattctgagaatcttctttgtgatgtgtgtattaaactcacagagttgaacctatcttttgatggagcagttttgaaactctctttttgtagaatctggaagtggatattggggagctttgaggtctattgtggaaagggaaatatcttcacataaaacctacacagaagcatattgagaaaattcttgtgatgtgtgcattcacctcacagagttgaacctttcttttgattgaatacttttgaatcactcgttttgtagaatctgcaagtggatgtttggagagctttgaggaaaaggaaatatcttcacataaaaactacacagaccattctgagaaacttctttgccatgtgtgcattcatttcacaaagtgaacttttcttttgatactgcagtttttcagcactctttttgtagaatctgcaagtagatatttggagcaccttgaggcctctagtggaaaaggaaatatcctcacataaaaattacacagaagtattctgagaaacttctttgtgatgtttactttcatgtcacagatttgaacctgactttggattgaacagttttgaaacactctttttgtagaatctgcaagaggatggatggagcgctttgaggaaatggtggaaaacgaaatatcttcacataaaaactacacagaagtattcagagaaacttctttgttatgtgtgcattcatttcacaaatttaaacctttcttttgatagagcagttttgaaactctctttttgtagaatctaaggtgaatatttgaagccctttgcagccaacggtggaaaaggaaatatcttcacatgaaaactacacagagtcattctcagaaacttctttgtgatgtgtgaattcatctcacagagttgaagctttcttttgattgagcagttttgaaaaacatcttttgtagaatctgcaaatggatatttggagcgccttgaggcctattttggaaaaagaaatatatacacataaaaactacacagaagcattctgataaacttctttgtgatgtgtgcattcatctgactgagttgaagctttcttttgattgagcagtttggaaacactctttttgaagaatctgctagtggatatttggagtggtttcaggccaatggtggaaaaggcaatatcttcacataaaaactacacagaagaattctgagaaacttcttttggatgtgtgcattcaactcacagatttgaacctatcttttgattgagcagttttgaacctctctttttgtagaatctgcaagtggggatttggatccctttgtggccaatgatggaaaaggaaatatcttcacataaaaactttgcagaagtattctgagaaacttatttgcaatgtcttcattcatctcgtaaggttaaacctttcctttgattcagcagttttgaaacattctttttgtaaaatctgcaagtggatatttggggtgctttgaggtttattgtggaaaaggatatatcttcatataaaacctacacagaagcgttctgagaaacttctttgtgatctgtgcattcatctcacagaattgaacctttcttttgattgagtagttttgaaacactctttttgtaacttctgcaagtggatatttggagctatttgaggcctattgtggaaaaggaaatattttcacatagaaactacacagaagcattctgagaaacttctttgtgatgtgtgcattcatctcacagagttgaacctttttttttttgttcagcaattttgaaacactctttttgtagaatctgctagtggatatttggagctcgttgaggcctattgtgaaaaagtaaatatcttcacataaaaactatgtggaagttttctgacacatttctttgtgatgtgtaaattcaactcacaagttgacctatctgttgtttgagcagttctgaaactcttttagtagaatctgcaaatggatatttggagccctttgtggcctatggtggaaaaggaaatatcttcacataaaaactacccagaagcattctgagacacttctttgtgatgtgtgcattcaactcgcagacttgaacgtatcttttgattcagcagttttgtatctctctttttgtagaatctgcaagtggatattttgtgtccttcgtggcctactgtggaaaaggaaatatcttcacataaaaactacacataagcattctgagaaacttctttgtgatgtgtgcattcatctcatagagttgaacatgtcttttttttttacattttaatttttaaaaatttatttatttttttcttttattattattatactttaagtttagggtacatgtgcacaatgtgcagggtagttacatgtgtatacatgtgccatactggtgtgctgcacccattaactcttcatttagcattaggtatatctcctaaagctatccctccctcctccccccaccccacaacagtcccacgagtatgatgatccccttcttgtgtccatgttttctcattgttcaattctcacctatgagtgagaatatgcaatgtttggttttttgctcttgccatagtttactgagatgatgagttccaatttcatccatgtccctacaaaggacatgaactcatcattttttatggctgcatagtattccatggtgtatatgggccacattttcttaatccagtctatcattgttggacatttgggttggttccaagtctttgctactgtgaataatgccgcaataaacatacgtgtgcatgtgtctttatagcagcatgatttatagtcctttgggtatatacccagtaatgggatggctgggacacatggtatttctagttctagatccctgaggaatcgccacactgacttccacaatggttgaactagttgacagtcccaccaacagtgtaaaagtgttcctatttctccacatcctctccagtacctgttgtttcctgacattttaatgatcgccattctaactggtgtgagatggtatctcattgtggttttgatttgcatttctctgatggccagtgatgatgagcattttttcatgtgttttttggctgcataaatgtcttcttttgagaagtgtctgttcatgtcctttgcccacttttggatggggttgtttgtttttttcttgtaaatttgtttgagttcattgtagattctggatattagccctttgtcagatgagaaggttatgaaaactttctcccattttgtaggttgcctgttcactctgatggtagtttcttttgctgtgcagaagctctttagtttcattagatcccgtttgtcaattttgggttttgtttccattgcttttggtgtttagacaagaagtccttgcccatgcctgtgtcctgaatagtaatgtctaggttttcttctagggtttcatggttttaggtctaacgtttaagtctttaatccatcttgaattaatttgagcagttttgaaacaatcttttagtagcatctgcaagtggatatttggagtgctttgaggcctattgcggaaaaggaaatatcttcacatgaaaactacacagaagcattctgagaaacttctatgtgatgtgtgcattcatcccatggtgttgaattttcttttgattgagcagttttgaaacactcttcttgtagaatctgcaaggtgatatttggagcccttcgaggcctatggtggaaaaggaaatatcttcacctaaaacctacacagaagcattctgagaatatacttggtgatgttggcattcacctcacagtgttgaacctatcttttgactgagcagttttgaatccgtctttttgtagaatcttcaggtgtatatttggagccctttgcgacctattgtggaaaaggaaatgtcttcacataaaaactacacagaagcattctgagaaacttctttgtgatgtgtgctttcatcacacagagttgaaagtttcttttgattgagcagtgtgaagcactctttttgtagaatttgcaagtagatatttttagtactttgacacatattgtggaaagggaaatatcttcacatgaaaactacacagaagcattctgagaaacttcattgtaatgtgtgcattcatttcacagagttgaacttttcttttgatagagcagtttggaaacactctttttgcagaatctacaagtgtacatttggagcgctttgaggcttatggtggaaaaggacatatcttcacataaaaactacacagaagcattctgagaaacttctttgtgatgtgtgtattcaactcacagagtggaacatatgttttgatagagcagttttgaaactctctttttggagaatctgcaagtggatatttggagcccattgtggcctatggtgttaaaggaaacgttctcacataaaaactgcacagaagcattctgagaaacttctttgtgaggtgtgcagtcatctccactgttgaacctttcttttgattgagcagttttgaaacatttttttgtgatatttgcaagtggatatttggatcactatgaggcctatagtggaaaaggaaatatcttcaccaaaaaactacacagaagcattctgagacacttcctagtgatttgtgcatttatctcacagagttgaaactttcttttgaatgagcagttttgaaactctctttttgtagaatcttcaagtgcctgtttggagtgctttcaggcctatggtggaaaaggaaatgtcttcacataaaaattacacaggagaattctgagaaacttctttgtgatgtgtgcattcaactcacagagttgaacctatttttgagagagaagctttgaaactctctttttgtagaatctgcaagtggatatttggagcccttggaggcctatggtggaaaacgaaatgtcttcacataaaaactacacagaagcattctgagaaacttctttgtgatgtgtgcattcatctcacagaattgaacctttcttttgattgagcagttggaaacactctttttgtacaatctgcaagtcagtatttggagtgccttgtggcctgtggtggaaaaggaaatatcttcacataaaaactacacagaggcattctcagaatcttctttgtgatgtgaacattcaactaacagatttgaccttctctttcaattgagcagttttgcatctctctttctgtataatctgtaagtgggtaattggagccttttgtggcctgttttggaaaaggaaaaatcttcacatgaaaactacacagaagcattctttgaaactgctttgtagtgtgtgcattcatctcacagaattgaacaattcttttgattgggcagttttgaaacacactttttatggaatctgcaagtggatatttgaagcgcttagaagcctattatggaaaaggaaatatcttcacattgaaactacacagaagcattcagagaaacttctttgggatgtgtgcattcagctcacagagttgaacctatctttttagagagaagttttgaaactctctttttgtagaatctgcaagtgcatatttggaactctttgaggcctatggtggaaaaggaaatatcttcacataaaaactacacagaagcattctgagaaacttctttgtgatttgtgcattcaactcacagagttgacctatctttttagagagaagctttgaaactctctttttgtagaatctgcaagtggatatttggagccatttgaggcctatggtggaaaaggaaatatcttcatataaaaactagacagaagcattctcagaaacttctttgtgatgtgtgcattcatctcacagagttgaacctttcttttgattgagcagttggaaacactctttttgtacaatctgcaagtcagtttttagagcgccttgaggcctatggcggagaaggaaatatcttcacataaaaactacacagaagcattctcagaatcttctttgtgatgtgagcattcaactcacagagtagagcctctgttttcattgagcagttttgaatctctctttctgtataatctgtaagtggatatttggagccctttctggcctgttttggaaaaagaaatatcttcacacaaaaactacacagaagcattctgagaaacttctttgtaatgtgtgcattcatctcacagagttgaatatttcttttgattgggcagttttgaaacacactttttatggaatctgcaagtggatatttgaagcgcttggaagcctattatggaaaaggaaatatcttcacattaaaaggacacagaagcattcagagaaacttctttgggatatgtgcattcatctcagagagttgaacctttcttttgattgtacagttaaaaacactctttttgtagaatctgcaagtgaacatttggagtgctttgtggcctgaggtggaaaaggcaatatcttcacataaaaactttatagaagcattctgagaaacttttttgatttgtgcattcatctaacagaagtgaagctttcttttgatggacctggtttgaaatactctttttgtggaatctgcaagtggacatttggaacactttgaggcctatggtggaaaaggaaatatgttcacataaaaactacacagaagaattctgagaaacttatctgcgatgtgtgcattcatttcgcagatttcaacgtttattttgattgagcagttaggaaacactctttttgtagaatctgcaaatggacatttggagcgctttgtggattatgttagaaaacgaaatatattcacatgaaaactagacaaaaaaattctgagaaacttcttggtgatgtatgcgttcatctcacagagttggacctttcttttgattgagctgtttggaaacactcttttgtggaatctgcaaatggatatttggagcgctttgctgcctatgatagaaaagcaaatatcttcacataatatctagacagaagcaatctgagaaacttatttgcgatgtgtccattcaagtcaccgagttaaaccgttcttttgattgagcagttttgaaactctttttgtaaaatctgcaactggacatttggagcgctttaaggcctatgttggaaaaggaaatatcttcatataaaaactagacagaataattctgagaaacttctttagaatgtgtgtgttcatctcacagagttatacctttctttttattaagcagttttgaaactctctttttgtagaatctgcaagtggacatttggagcgctctgtggtctatggtagaaaaggaaatatcttcacataaaatctagacagaagcaatctgagaaacttctttgtgatgtgtgcattcatctcacagagttaaacgtttcttttgattgagcagttttgaaactctgtttttgtagtatctgcaagtggacatttggagcgctttgaggcctatggtggaaaaggaaatatcttcacataaaaactagacagaagaattctgagaaacttccttgtgatgtgtgcgttcatctcacagagttgaacctttcttttggttgagcagtttggaaacactccttttgtagaatctgcaagtggacatttggatcactttgcagcctatgtttgagaaggaaatatcttcacaacaaaacaagacggaagaattctgagaaacttctttgtgatgtgtgcattaatcccacagagttgaatgtttgttttcattgagcagtttggaaacaatctttttgtagaatctgtaagtggaaatttggagcgcattgcggcctattgtagaaaaggaaatatcttcacataaaatctagacagaagaaatttgagaaactcctttgtgatgtgtgtgttcatctcacagagttgaatctttctttttattgagcagtttggaaacactctttttgtagaatctgcaagtggacatttggagcactttgaggcatatggtggaaaaggaaatatgttcacataaaaattagacagacgaattctgagaaactactttttgatatgcgttcatctcacacagttgaacctttcttttgattgagtagtttggaaacactctttttgtagaatctgcaagtggacatttggagtgctttgcggcctatggtagaaaaggaaataccttcacataaaatctagacagaagcaatctgagaaatttctttcttatgtgtgctttcatctcacagagttgaacttttcttttgattgagcagtttggaaaaactctttttgtgcaatctgcaactggacatttggagcgctttgcagcctaagttagaaaatgaaatatcttcacataaaaactagacagaagaattctgagaaacttccttgtaatgtgtgcgtttatctcacagagttgaacctttcttttgattcaggtgtttggaaactctctttttgtagaatctgcatttggacatttggagccctttttggcctatggtagaaaaggaagtatcctcacataatatctagacagaagttatctaagaaacttctttttgatgtgtgcattcttctcaccaagttaaacctttctattgattgagcagttttgaaactctctttttgtagaatgtggaagtagacatttggagcactttgagacctctggtggaaaagggaatatcttcacataaaaagaagatagaagaattctgagaaacttccttctgatgtgtgcgttcatctcacagagtcgaacaattgttttgattgagcagtttggaaacactctttttgtagaatctgcaagtggacatttggagtgctttgtagcctacggcagaaaaggtaatgtcttcacatgaaatctagacagaagaaatctgagaaaatactttttgatgtgtgtgttcatctcacagacttgaatcttttttttgattgagcagtttggaaatactctgttttctagaatctgcaagtggacatttggaacgctttgcggcttaaggtagaaaaggaaatatcttcaaataaaatctagacagaatcaatctgaggaacttctttgtgatgtgtgcattcgtcccacagagttaaacctttcttttgattgagaagttttgagactctttttgtagtacctggaagtggacatttcgaaggccttgaggcctatggtggaaaaggaaatatcttctcataaaaactagactgaagtattctgtaaaactcctttgtgatgtttgcattcaactcagaaagttgaacttctctttatatagtccagttttcaaacactatttttgtagaatctgcaagtggatactgggactgctttgaggccttcgttggaaacgggattatcttcacatagaaactagactgaaggattcttagaaacttctttgtgatgtgtgcattcaactcaccgagtggaacctcacttttgatagagcagtgttgaaagacacttgttgtagaatctgcaggtggatatttggagtgctttgaagccttccttggaaacgggaatatcttcacataaaaactagacataagcattctcagaaactcctttgtgatctgtccattcagctcacagagttgaaccttccttttgatagagcagttttgaaacactctttctgtagagtctgcaagtggatatcaggagcgctttgaggcctatggtagaaaaagaaatatctgcatataaaaactagacagaagcattctgagaaacttctttgtgatgtttgcattcaactaccagagttgaaccttccttttgatagagcagttttgaaacactctttgtgtagaatctgcatgtggatatctggagcgatttgaggcctatggtcaaaaaggaaatatcttcctatgaaaaacagacaaaagcattctcagaaactacttagagatatgtgcattcaactcacagagttgaaacttttttttgatagagcagttttgaaacactctgtagaatctgaaagtggatatttggagctatttgagggctatggtggaaaagaaaatatattcccattaaactagacagaagcatcctcagaaacttctttatgatgtttgcattaaactcacagagttgaacatacctttccatagagcagttttgaaacactctttttggggaatccgcaagtggatatttggaccgctttgagacctttgctggaaatgggaatatcttcacatataaactagacagaagcattctcggaaacttcttcgtgatgtgtgcattctgctcccaaagttgaaccttccttttcataaagcagttttgaaacactcttttgtacaatctaccattggatatgtggaaggctttgatgcccatggtagaaatggaaacatcctcatataaaatctagacagaaggattcacagaaactgctgtgtgatgtgtgcatccaaatcacggagttgaacttttcttttgttagagcagttttgaaaccctgtttccgtggaatctgccagtggacatttggagcgcattgagggctatggtggagaaggaaatatcttcacataaaaactagaaagaagcattctcagaaacatctatgtgaagtatgcattcaactcacagagttgaaccttccttttgatagaagagttttgaaacactcttttgtacaattgcaggtgaatatttggagcgctttgaagcctttgttggaaatgggaatatcctcacattaaaaactagccagaagcattctcagaaacttctttgtgatgtgtgcattgaacccagagagatgaaccgttcctttgagagagcagttttgaaacgtgtttttgtaagatctgcaagtggatatttggggcgctttgagtccttaggtggaaacgggaatatcttcgaataaaaactagacagaattattctcagaatcttctttgtgatgtgggcattcaactaacacagttgaacatttcttttgacagagcagttctgaaacactctttttgtagaatccgccagtggatatttggagcgctttgagggctattgtgcaaatggaaatatcttcacctaaaaactagaccgaagcaatcccagaaactactttgtgatgtttgcattcaactcacagagttgaacctacctcttcatagggcagtttggaaaacctctttttgtagaatctgcaagtggatatttggaccactttgaggccttcataggaaacagtactatcttcacataaaaactaggtagaagcattctcagaaacttctttgtgatgtgtgaattcaactcacagagttgaaccttcctttaatagagcagttttgaaacactctttttgtagaatttgccagtagatatttggagcgctttgaggccttcgttggaaaccggaatatcttcacataaaaagtagatagagccattctcagaaacttttttgtgatatgtagattcaactcacagcgttgaacctttcttttgatagagcagttttgaaaaactcttttatcgaatctgcaagtagacatttggagtgctttgagggctgtggtcgaaaaggaaatatcttcacatagaaactagactgaagcattctcagcaacttctttgtgacgtttgcattcatctcacagtgttgaacataccttttcatagagcagttttgaaacactatttttgtagtatctgcaagtggatatttggactgctttgaggccttcattggaaacgggaatatcttcacataaacactagacagaagcattctctgaaacttctttgtgatgtgtgtattcaactcacagagttgaaccatcttttttatggagcggttttgaaacagcgtttttgtagaatcagcaagtggatattgggaacactttgaggcctctggtggaaagggaatgtcttcacataaaaactggacagaagcattctcagaaacatctttgtgatgtttgcattcaactcacagagttgatccttccttttaatagggcagttttgcaacactctttttgtagaatgcaccagtgggcttttggagcacgtcaagggctatggtgaaaaaggaaatatcttctcataaaaactagactgaagtattctgtaaaactcctttgtgatgtttgcattcaactcagaaagttgaacttctctttatatagtccagttttcaaacactatttttgtagaatctgcaagtggatactgggactgctttgaggccttcgttggaaacgggattatcttcacataaaaactagactgaaggattcttagaaacttctttgtgatgtgtgcattcaactcaccgagtggaacctcacttttgatagagcagtgttgaaagacacttgttgtagaatctgcaggtggatatttggagtgctttgaagccttccttggaaacgggaatatcttcacataaaaactagacataagcattctcagaaactcctttgtgatctgtccattcagctcacagagttgaaccttccttttgatagagcagttttgaaacactctttctgtagagtctgcaagtggatatcaggagcgctttgaggcctatggtagaaaaagaaatatctgcatataaaaactagacagaagcattctgagaaacttctttgtgatgtttgcattcaactaccagagttgaaccttccttttgatagagcagttttgaaacactctttgtgtagaatctgcatgtggatatctggagcgatttgaggcctatggtcaaaaaggaaatatcttcctatgaaaaacagacaaaagcattctcagaaactacttagagatatgtgcattcaactcacagagttgaaacttttttttgatagagcagttttgaaacactctgtagaatctgaaagtggatatttggagctatttgagggctatggtggaaaagaaaatatattcccattaaactagacagaagcatcctcagaaacttctttatgatgtttgcattaaactcacagagttgaacatacctttccatagagcagttttgaaacactctttttggggaatccgcaagtggatatttggaccgctttgagacctttgctggaaatgggaatatcttcacatataaactagacagaagcattctcggaaacttcttcgtgatgtgtgcattctgctcccaaagttgaaccttccttttcataaagcagttttgaaacactcttttgtacaatctaccattggatatgtggaaggctttgatgcccatggtagaaaaggaaacatcctcatataaaatctagacagaaggattcacagaaactgctgtgtgatgtgtgcatccaaatcacggagttgaacttttcttttgttagagcagttttgaaaccctgtttccgtggaatctgccagtggacatttggagcgcattgagggctatggtggagaaggaaatatcttcacataaaaactagaaagaagcattctcagaaacatctatgtgaagtatgcattcaactcacagagttgaaccttccttttgatagaagagttttgaaacactcttttgtacaattgcaggtgaatatttggagcgctttgaagcctttgttggaaatgggaatatcctcacattaaaaactagccagaagcattctcagaaacttctttgtgatgtgtgcattgaacccagagagatgaaccgttcctttgagagagcagttttgaaacgtgtttttgtaagatctgcaagtggatatttggggcgctttgagtccttaggtggaaacgggaatatcttcgaataaaaactagacagaattattctcagaatcttctttgtgatgtgggcattcaactaacacagttgaacatttcttttgacagagcagttctgaaacactctttttgtagaatccgccagtggatatttggagcgctttgagggctattgtgcaaatggaaatatcttcacctaaaaactagaccgaagcaatcccagaaactactttgtgatgtttgcattcaactcacagagttgaacctacctcttcatagggcagtttggaaaacctctttttgtagaatctgcaagtggatatttggaccactttgaggccttcataggaaacagtactatcttcacataaaaactaggtagaagcattctcagaaacttctttgtgatgtgtgaattcaactcacagagttgaaccttcctttaatagagcagttttgaaacactctttttgtagaatttgccagtagatatttggagcgctttgaggccttcgttggaaaccggaatatcttcacataaaaagtagatagagccattctcagaaacttatttgtgatatgtagattcaactcacagcgttgaacctttcttttgatagagcagttttgaaaaactcttttatcgaatctgcaagtagacatttggagtgctttgagggctgtggtcgaaaaggaaatatcttcacatagaaactagactgaagcattctcagcaacttctttgtgacgtttgcattcatctcacagtgttgaacataccttttcatagagcagttttgaaacactatttttgtagtatctgcaagtggatatttggactgctttgaggccttcattggaaacgggaatatcttcacataaacactagacagaagcattctctgaaacttctttgtgatgtgtgtattcaactcacagagttgaaccatcttttttatggagcggttttgaaacagcgtttttgtagaatcagcaagtggatattgggaacactttgaggcctctggtggaaagggaatgtcttcacataaaaactggacagaagcattctcagaaacatctttgtgatgtttgcattcaactcacagagttgatccttccttttaatagggcagttttgcaacactctttttgtagaatgcaccagtgggcttttggagcacgtcaagggctatggtgaaaaaggaaatatcttctcataaaaactagacagaagtattctgtaaaactcctttgtgatgtttgcattcaactcagaaagttgaacttctctttatatagtccagttttcaaacactatttttgtagaatctgcaagtggatactgggactgctttgaggccttcgttggaaacgggattatcttcacatagaaactagactgaaggattcttagaaacttctttgtgatgtgtgcattcaactcaccgagtggaacctcacttttgatagagcagtgttgaaagacacttgttgtagaatctgcaggtggatatttggagtgctttgaagccttccttggaaacgggaatatcttcacataaaaactagacataagcattctcagaaactcctttgtgatctgtccattcagctcacagagttgaaccttccttttgatagagcagttttgaaacactctttctgtagagtctgcaagtggatatcaggagcgctttgaggcctatggtagaaaaagaaatatctgcatataaaaactagacagaagcattctgagaaacttctttgtgatgtttgcattcaactaccagagttgaaccttccttttgatagagcagttttgaaacactctttgtgtagaatctgcatgtggatatctggagcgatttgaggcctatggtcaaaaaggaaatatcttcctatgaaaaacagacaaaagcattctcagaaactacttagagatatgtgcattcaactcacagagttgaaacttttttttgatagagcagttttgaaacactctgtagaatctgaaagtggatatttggagctatttgagggctatggtggaaaagaaaatatattcccattaaactagacagaagcatcctcagaaacttctttatgatgtttgcattaaactcacagagttgaacatacctttccatagagcagttttgaaacactctttttggggaatccgcaagtggatatttggaccgctttgagacctttgctggaaatgggaatatcttcacatataaactagacagaagcattctcggaaacttcttcgtgatgtgtgcattctgctcccaaagttgaaccttccttttcataaagcagttttgaaacactcttttgtacaatctaccattggatatgtggaaggctttgatgcccatggtagaaaaggaaacatcctcatataaaatctagacagaaggattcacagaaactgctgtgtgatgtgtgcatccaaatcacggagttgaacttttcttttgttagagcagttttgaaaccctgtttccgtggaatctgccagtggacatttggagcgcattgagggctatggtggagaaggaaatatcttcacataaaaactagaaagaagcattctcagaaacatctatgtgaagtatgcattcaactcacagagttgaaccttccttttgatagaagagttttgaaacactcttttgtacaattgcaggtgaatatttggagcgctttgaagcctttgttggaaatgggaatatcctcacattaaaaactagccagaagcattctcagaaacttctttgtgatgtgtgcattgaacccagagagatgaaccgttcctttgagagagcagttttgaaacgtgtttttgtaagatctgcaagtggatatttggggcgctttgagtccttaggtggaaacgggaatatcttcgaataaaaactagacagaattattctcagaatcttctttgtgatgtgggcattcaactaacacagttgaacatttcttttgacagagcagttctgaaacactctttttgtagaatccgccagtggatatttggagcgctttgagggctattgtgcaaatggaaatatcttcacctaaaaactagaccgaagcaatcccagaaactactttgtgatgtttgcattcaactcacagagttgaacctacctcttcatagggcagtttggaaaacctctttttgtagaatctgcaagtggatatttggaccactttgaggccttcataggaaacagtactatcttcacataaaaactaggtagaagcattctcagaaacttctttgtgatgtgtgaattcaactcacagagttgaaccttcctttaatagagcagttttgaaacactctttttgtagaatttgccagtagatatttggagcgctttgaggccttcgttggaaaccggaatatcttcacataaaaagtagatagagccattctcagaaacttttttgtgatatgtagattcaactcacagcgttgaacctttcttttgatagagcagttttgaaaaactcttttatcgaatctgcaagtagacatttggagtgctttgagggctgtggtcgaaaaggaaatatcttcacatagaaactagactgaagcattctcagcaacttctttgtgacgtttgcattcatctcacagtgttgaacataccttttcatagagcagttttgaaacactatttttgtagtatctgcaagtggatatttggactgctttgaggccttcattggaaacgggaatatcttcacataaacactagacagaagcattctctgaaacttctttgtgatgtgtgtattcaactcacagagttgaaccatcttttttatggagcggttttgaaacagcgtttttgtagaatcagcaagtggatattgggaacactttgaggcctctggtggaaagggaatgtcttcacataaaaactggacagaagcattctcagaaacatctttgtgatgtttgcattcaactcacagagttgatccttccttttaatagggcagttttgcaacactctttttgtagaatgcaccagtgggcttttggagcacgtcaagggctatggtgaaaaaggaaatatcttctcataaaaactagactgaagtattctgtaaaactcctttgtgatgtttgcattcaactcagaaagttgaacttctctttatatagtccagttttcaaacactatttttgtagaatctgcaagtggatactgggactgctttgaggccttcgttggaaacgggattatcttcacataaaaactagactgaaggattcttagaaacttctttgtgatgtgtgcattcaactcaccgagtggaacctcacttttgatagagcagtgttgaaagacacttgttgtagaatctgcaggtggatatttggagtgctttgaagccttccttggaaacgggaatatcttcacataaaaactagacataagcattctcagaaactcctttgtgatctgtccattcagctcacagagttgaaccttccttttgatagagcagttttgaaacactctttctgtagagtctgcaagtggatatcaggagcgctttgaggcctatggtagaaaaagaaatatctgcatataaaaactagacagaagcattctgagaaacttctttgtgatgtttgcattcaactaccagagttgaaccttccttttgatagagcagttttgaaacactctttgtgtagaatctgcatgtggatatctggagcgatttgaggcctatggtcaaaaaggaaatatcttcctatgaaaaacagacaaaagcattctcagaaactacttagagatatgtgcattcaactcacagagttgaaacttttttttgatagagcagttttgaaacactctgtagaatctgaaagtggatatttggagctatttgagggctatggtggaaaagaaaatatattcccattaaactagacagaagcatcctcagaaacttctttatgatgtttgcattaaactcacagagttgaacatacctttccatagagcagttttgaaacactctttttggggaatccgcaagtggatatttggaccgctttgagacctttgctggaaatgggaatatcttcacatataaactagacagaagcattctcggaaacttcttcgtgatgtgtgcattctgctcccaaagttgaaccttccttttcataaagcagttttgaaacactcttttgtacaatctaccattggatatgtggaaggctttgatgcccatggtagaaatggaaacatcctcatataaaatctagacagaaggattcacagaaactgctgtgtgatgtgtgcatccaaatcacggagttgaacttttcttttgttagagcagttttgaaaccctgtttccgtggaatctgccagtggacatttggagcgcattgagggctatggtggagaaggaaatatcttcacataaaaactagaaagaagcattctcagaaacatctatgtgaagtatgcattcaactcacagagttgaaccttccttttgatagaagagttttgaaacactcttttgtacaattgcaggtgaatatttggagcgctttgaagcctttgttggaaatgggaatatcctcacattaaaaactagccagaagcattctcagaaacttctttgtgatgtgtgcattgaacccagagagatgaaccgttcctttgagagagcagttttgaaacgtgtttttgtaagatctgcaagtggatatttggggcgctttgagtccttaggtggaaacgggaatatcttcgaataaaaactagacagaattattctcagaatcttctttgtgatgtgggcattcaactaacacagttgaacatttcttttgacagagcagttctgaaacactctttttgtagaatccgccagtggatatttggagcgctttgagggctattgtgcaaatggaaatatcttcacctaaaaactagaccgaagcaatcccagaaactactttgtgatgtttgcattcaactcacagagttgaacctacctcttcatagggcagtttggaaaacctctttttgtagaatctgcaagtggatatttggaccactttgaggccttcataggaaacagtactatcttcacataaaaactaggtagaagcattctcagaaacttctttgtgatgtgtgaattcaactcacagagttgaaccttcctttaatagagcagttttgaaacactctttttgtagaatctgccagtagatatttggagcgctttgaggccttcgttggaaaccggaatatcttcacataaaaagtagatagaggcattctcagaaacttttttgtgatatgtagattcaactcacagcgttgaacctttcttttgatagagcagttttgaaaaactcttttatcgaatctgcaagtagacatttggagtgctttgagggctgtggtcgaaaaggaaatatcttcacatagaaactagactgaagcattctcagcaacttctttgtgacgtttgcattcatctcacagtgttgaacataccttttcatagagcagttttgaaacactatttttgtagtatctgcaagtggatatttggactgctttgaggccttcattggaaacgggaatatcttcacataaacactagacagaagcattctctgaaacttctttgtgatgtgtgtattcaactcacagagttgaaccatcttttttatggagcggttttgaaacagtgtttttgtagaatcagcaagtggatattgggagcgctttgaggcctctggtggaaagggaatgtcttcacataaaaactggacagaagtattctcagaaacatctttgtgatgtttgcattcaactcacagagttgatccttccttttaatagggcagttttgcaacactctttttgtagaatgcaccagtgggcttttggagcacgtcaagggctatggtgaaaaaggaaatatcttcacataaaaactagacagaagtattctgtaaaactcctttgtgatgtttgcattcaactcagaaagttgaacttctctttatatagtccagttttcaaacactatttttgtagcatctgcaagtggatactgggactgctttgaggccttcgttggaaacgggattaccttcacatagaaactagactgaaggattcttagaaacttctttgtgatgtgtgcattcaactcaccgagtggaacctcacttttgatagagcagtgttgaaagacacttgttgtagaatctgcaggtggatatttggagtgctttgaagacttccttggaaacgggaatatcttcacataaaaactagacataagcattctcagaaacccctttgtgatctgtccattcagctcacagagttgaaccttccttttgatagagcagttttgaaacactctttctgtagagtctgcaagtggatatcaggagcgctttgaggcctatggtagaaaaagaaatatctgcatataaaaactagacagaagcattctgagaaacttctttgtgatgtttgcattcaactaccagagttgaaccttccttttgatagagcagttttgaaacactctttgtgtagaatctgcatgtggatatctggagcgatttgaggcctatggtcagaaaggaaatatcttcctatgaaaaacagacaaaagcattctcagaaactactttgagatatgtgcattcaactcacagagttgaaacttttttttgatagaggagttttgaaacactctgtagaatctgaaagtggatatttggagctatttgagggctatggtggaaaagaaaatatattcccattaaactagacagaagcatcctcagaaacttctttatgatgtttgcattaaactcacagagttgaacatacctttccatagagcagttttgaaacactctttttggggaatccgcaagtggatatttggaccgctttgagacctttgctggaaatgggaatatcttcacatataaactagacagaagcattctcggaaacttcttcgtgatgtctgcattctgctcccaaagttgaaccttccttttcataaagcagttttgaaacactcttttgtacaatctaccattggatatgtggaaggctttgatgcccatggtagaaaaggatacatcctcatataaaatctagacagaaggattcacagaaactgctgtgtgatgtgtgcatccaaatcacggagttgaacttttcttttgttagagcagttttgaaaccctgtttccgtggaatctgccagtggacatttggagcgcattgagggctatggtggagaaggaaatatcttcacataaaaactagaaagaagcattctcagaaacatctatgtgaagtgtgcattcaactcacagagttgaaccttccttttgatagaagagttttgaaacactcttttgtacaattgcaggtgaatatttggagcgctttgaagcctttgttggaaatgggaatatcctcacataaaaactagccagaagcattctcagaaacttctttgtgatgtgtgcattgaacccagagagatgaaccgttcctttgagagagcagttttgaaacgtgtttttgtaagatctgcaagtggatatttggggcgctttgagtccttaggtggaaacgggaatatcttcgaataaaaactagacagaatgattctcagaatcttctttgtgatgtgggcattcaactaacacagttgaacatttcttttgacagagcagttctgaaacactctttttgtagaatccgccagtggatatttggagcgctttgagggctattgtgcaaatggaaatatcttcacctaaaaactagaccgaagcaatcccagaaactactttgtgatgtttgcattcaactcacagagttgaacctacctcttcatagagcagtttggaaaacctctttttgtagaatctgcaagtggatatttggaccacattgaggccttcataggaaacagtactatcttcacataaaaactaggtagaagcattgtcagaaacttctttgtgatgtgtgaattcaactcacagagttgaaccttcctttaatagagcagttttgaaacactctttttgtagaatctgccagtagatatttggagcgctttgaggccttcgttggaaaccggaatatcttcacataaaaagtagatagaggcattctcagaaacttttttgtgatatgtagattcaactcacagcgctgaacctttcttttgatagagcagttttgaaaaactcttttatcgaatctgcaagtagacatttggagtgctttgagggctgtggtcgaaaaggaaatatcttcacatagaaactagactgaagcattctcagcaacttctttgtgacctttgcattcatctcacagtgttgaacataccttttcatagagcagttttgaaacactatttttgtagtatatgcaagtggatatttggactgctttgaggccttcattggaaacgggaatatcttcacataaacactagacagaagcattctctgaaacttctttgtgatgtgtgtattcaactcacagagatgaaccatcttttttatggagcggttttgaaacagtgtttttgtagaatcagcaagtggatattgggagcgctttgaggcctctggtggaaagggaatgtcttcacataaaaactggacagaagcattctcagaaacatctttgtgatgtttgcattcaactcacagagttgatccttccttttaatagggcagttttgcaacactctttttgtagaatgcaccagtgggcttttggagcacgtcaagggctatggtgaaaaaggaaatatcttcacataaaaactagacagaagtattgtgtaaaactcctttgtgatgtttgcattcaactcagaaagttgaacttctctttatatagtccagttttcaaacactatttttgtagaatctgcaagtggatagtgggactgctttgaggccttcattggaaacgggattatcttcacataaaaactagacataagcattctcagaaactcctttgtgatctgtccattcagctcacagagttgaaccttccttttgatagagcagttttgaaacactctttctgtagagtctgcaagtggatatcaggagtgctttgtggcctatggtagaaaaagaaatatctgcatataaaaactagacagaagcattctgagaaacttctttgtgatgtttgcattcaactaccagagttgaaccttccttttgatagagcagttttgaaacactctttgtgtagaatctgcatgtggatatctggagcgatttgaggcctatggtcaaaaaggaaatatcttcctatgaaaaacagacaaaagcattctcagaaactactttgagatatgtgcattcaactcacagagttgaaacttttttttgatagagcagttttgaaacactctgtagaatctgaaagtggatatttggagctatttgagggctatggtggaaaagaaaatatattcccattaaactagacagaagcatcctcagaaacttctttatgatgtttgcattaaactcacagagttgaacatacctttccatagagcagttttgaaacactctttttggggaatccgcaagtggatatttggaccgctttgagacctttgctggaaatgggaatatcttcacatataaactagacagaagcattctcggaaacttcttcctgatgtgtgcattctgctcccaaagttgaaccttcctcttcataaagcagttttgaaacactcttttgtacaatctaccattggatatgtggaaggctttgatgcccatggtagaaaaggatacatcctcatataaaatctagacagaaggattcacagaaactgctgtgtgatgtgtgcatccaaatcatggagttgaacttttcttttgttagagcagttttgaaaccctgtttccgtggaatctgccagtggacatttggagcacattgagggctatggtggagaaggaaatatcttcacataaaaactagaaagaagcattctcagaaacatctatgtgaagtgtgcattcaactcacagagttgaaccttcgttttgatagaagagttttgaaacactcttttgtacaattgcaggtgaatatttggagcgctttgaagcctttgttggaaatgggaatatcctcacataaaaactagccagaaacattctcagaaacttctttgtgatgtgtgcattgaacccagagagatgaaccgttcctttgagagagcagttttgaaacgtgtttttgtaagatctgcaagtggatatttggggcgctttgagtccttaggtggaaacgggaatatcttcgaataaaaactagacagaatgattctcagaatcttctttgtgatgtgggcattcaacaaacacagttgaacatgtcttttgacagagcagttctgaaacactctttttgtagaatccgccagtggatatttggagcgctttgagggctattgtgcaaatggaaatatcttcacctaaaaactagaccgaagcaatcccagaaactactttgtgatgtttgcattaaactcatagagttgaacctacctcttcatagagcagtttggaaaacctctttttgtagaatctgcaagtggatatttggaccactttgaggccttcataggaaacagtactatcttcacataaaaactaggtagaagcattgtcagaaagttctttgtgatgtgtgaattcaactcacagagttgaaccttcctttaatagagcagttttgaaacactctttttgtagaatctgcaagtagatatttggagcgctttcaggccttcgttggaaaccggaatatcttcacataaaaagtagatagaggcattctcagaaacttttttgtgatatgtagattcaactcacagcgctgaacctttcttttgatagagcagttttgaaaaactcttttatcgaatctgcaagtagacatttggagtgctttgagggctgtggtcgaaaaggaaatatcttcacatagaaactagactgaagcattctcagcaacttctttgtgacgtttgcattcatctcacagtgttgaacataccttttcatagagcagttttgaaacactatttttgtagtatctgcaagtggatatttggactgctttgaggccttcattggaaacgggaatatcttcacataaacactagacagaagcattctctgaaacttctttgtgatgtgtgtattcaactcacagagttgaaccatcttttttatggagcggttttgaaacagtgtttttgtagaatcagcaattggatatttggagcgctttgaggcctctggtgtaaagggaatgtcttcacataaaaactggacagaagcattctcagaaacatctttgtgatgtttgcattcaactcacagagttgatccttccttttaatagggcagttttgcaacactctttttgtagaatgcaccagcgggcttttggagcacgtcaagggctatggtgaaaaaggaaatatcttcacaaaaaaccagacagaagtattctgtaaaactcctttgtgatgtttgcattcaactcagaaagttgaacttctctttatatagtccagttttcaaacactatttttgtagaatctgcaagtggatactgggactgctttgaggccttcgttggaaacgggattatcttcacatagaaactagactgaaggattcttagaaacttctttttgatgtgtgcattcaactcaccgagtggaacctcacttttgatagagcagtgttgaaagacacttgttgtagaatctgcaggtggatatttggagtgctttgaagccttccttggaaacgggaatatcttcacataaaaactagacataagcattctcagaaactcctttgtgatctgtccattcagctcacagagttgaaccttccttttgatagagcagttttgaaacactctttctgtagagtctgcaagtggatatcaggagcgctttgaggcctatggtagaaaaagaaatatctgcatataaaaactagacagaagcattctgagaaacttctttgtgatgtttgcattcaactaccagagttgaaccttccttttgatagagcagttttgaaacactctttgtgtagaatctgcatgtggatatctggagcgatttgaggcctatggtcaaaaaggaaatatcttcctatgaaaaacagacaaaagaattctcagaaactacttagagatatgtgcattcaactcacagagttgaaacttttttttgatagagcagttttgaaacactctgtagaatctgaaagtggatatttggagctatttgagggctatggtggaaaagaaaatatattcccattaaactagacagaagcatcctcagaaacttctttatgatgtttgcattaaactcacagagttgaacatacctttccatagagcagttttgaaacactctttttggggaatccgcaagtggatatttggaccgctttgagacctttgctggaaatgggaatatcttcacatataaactagacagaagcattcttggaaacttcttcgtgatgtgtgcattctgctcccaaagttgaaccttccttttcataaagcagttttgaaacactcttttgtacaatctaccattggatatgtggaaggctttgatgaccatggtagaaaaggaaagatcctcatataaaatctagacagaaggattcacagaaactgctgtgtgatgtgtgcatccaaatcacggagttgaacttttcttttgttagagcagttttgaaaccctgtttccgtggaatctgccagtggacatttggagcgcattgagggctatggtggagaaggaaatatcttcacataaaaactagaaagaagcattctcagaaacatctatgtgaagtgtgcattcaactcacagagttgaaccttccttttgatagaagagttttgaaacactcttttgtacaattgcaggtgaatatttggagcgctttgaagcctttgttggaaatgggaatatcctcacataaaaactagccagaagcattctcagaaacttctttgtgatgtgtgcattgaacccagagagatgaaccgttcctttgagagagcagttttgaaacgtgtttttgtaagatctgcaagtggatattaggggcgctttgagtccttaggtggaaacgggaatatcttcgaataaaaactagacagaattattctcagaatcttctttgtgatgtgggcattcaactaacacagttgaacatttcttttgacagagcagttctgaaacactctttttgtagaatccgccagtggatatttggagcgctttgagggctattgtgcaaacggaaatatcttcacctaaaaactagaccgaagcaatcccagaaactactttgtgatgtttgcattcaactcacagagttgaacctacctcttcatagagcagtttggaaaacctctttttgtagaatctgcaagtggatatttggaccactttgaggccttcataggaaacagtactatcttcacataaaaactaggtagaagcattctcagaaacttctttgtgatgtgtgaattcaactcacagagttgaaccttcctttaatagagcagttttgaaacactctttttgtagaatctgccagtagatatttggagcgctttgaggccttcgttggaaaccggaatatcttcacataaaaagtagatagaggcattctcagaaacttttttgtgatatgtagattcaactcacagcgctgaacctttcttttgatagagcagttttgaaaaactcttttatcgaatctgcaagtagacatttggagtgctttgagggctgtggtcgaaaaggaaatatcttcacatagaaactagactgaagcattctcagcaacttctttgtgacgtttgcattcatctcacagtgttgaacataccttttcatagagcagttttgaaacactatttttgtagtatctgcaagtggatatttggactgctttgaggccttcattggaaacgggaatatcttcacataaacactagacagaagcattctctgaaacttctttgtgatgtgtgtattcaactcacagagttgaaccatcttttttatggagcggttttgaaacagtgtttttgtagaatcagcaagtggatattgggagcgctttgaggcctctggtggaaagggaatgtcttcacataaaaactggacagaagcattctcagaaacatctttgtgatgtttgcattcaactcacagagttgatccttccttttaatagggcagttttgcaacactctttttgtagaatgcaccagtgggcttttggagcacgtcaagggctatggtgaaaaaggaaatatcttcacataaaaactagacagaagtattctgtaaaactcctttgtgatgtttgcattcaactcagaaagttgaacttctctttatatagtccagttttcaaacactatttttgtagaatctgcaagtggatactgggactgctttgaggccttcgttggaaacgggattatcttcacatagaaactagactgaaggattcttagaaacttctttgtgatgtgtgcattcaactcaccgagtggaacctcacttttgatagagcagtgttgaaagacacttgttgtagaatctgcaggtggatatttggagtgctttgaagccttccttggaaacgggaatatcttcacataaaaactagacataagcattctcagaaactcctttgtgatctgtccattcagctcacagagttgaaccttccttttgatagagcagttttgaaacactctttctgtagagtctgcaagtggatatcaggagcgctttgaggcctatggtagaaaaagaaatatctgcatataaaaactagacagaagcattctgagaaacttctttgtgatgtttgcattcaactaccagagttgaaccttccttttgatagagcagttttgaaacactctttgtgtagaatctgcatgtggatatctggagcgatttgaggcctatggtcaaaaaggaaatatcttcctatgaaaaacagacaaaagcattctcagaaactactttgagatatgtgcattcaactcacagagttgaaacttttttttgatagagcagttttgaaacactctgtagaatctgaaagtggatatttggagctatttgagggctatggtggaaaagaaaatatattcccattaaactagacagaagcatcctcagaaacttctttatgatgtttgcattaaactcacagagttgaacatacctttccatagagcagttttgaaacactctttttggggaatccgcaagtggatatttggactgctttgagacctttgctggaaatgggaatatcttcacatataaactagacagaagcattctcggaaacttcttcgtgatgtgtgcattctgctcccaaagttgaaccttccttttcataaagcagttttgaaacactcttttgtacaatctaccattggatatgtggaaggctttgatgcccatggtagaaaaggaaacatcctcatataaaatctagacagaaggattcacagaaactgctgtgtgatgtgtgcatccaaatcacggagttgaacttttcttttgttagagcagttttgaaaccctgtttccgtggaatctgccagtggacatttggagcgcattgagggctatggtggagaaggaaatatcttcacataaaaactagaaagaagcattctcagaaacatctatgtgaagtgtgcattcaactcacagagttgaaccttccttttgatagaagagttttgaaacactcttttgtacaattgcaggtgaatatttggagcgctttgaagcctttgttggaaatgggaatatcctcacataaaaactagccagaagcattctcagaaacttctttgtgatgtgtgcattgaacccagagagatgaaccgttcctttgagagagcagttttgaaacgtgtttttgtaagatctgcaagtggatattaggggcgctttgagtccttaggtggaaacgggaatatcttcgaataaaaactagacagaattattctcagaatcttctttgtgatgtgggcattcaactaacacagttgaacatttcttttgacagagcagttctgaaacactctttttgtagaatccgccagtggatatttggagcgctttgagggctattgtgcaaacggaaatatcttcacctaaaaactagaccgaagcaatcccagaaactactttgtgatgtttgcattcaactcacagagttgaacctacctcttcatagagcagtttggaaaacctctttttgtagaatctgcaagtggatatttggaccactttgaggccttcataggaaacagtactatcttcacataaaaactaggtagaagcattctcagaaacttctttgtgatgtgtgaattcaactcacagagttgaaccttcctttaatagagcagttttgaaacactctttttgtagaatctgccagtagatatttggagcgctttgaggccttcgttggaaaccggaatatcttcacataaaaagtagatagaggcattctcagaaacttttttgtgatatgtagattcaactcacagcgctgaacctttcttttgatagagcagttttgaaaaactcttttatcgaatctgcaagtagacatttggagtgctttgagggctgtggtcgaaaaggaaatatcttcacatagaaactagactgaagcattctcagcaacttctttgtgacgtttgcattcatctcacagtgttgaacataccttttcatagagcagttttgaaacactatttttgtagtatctgcaagtggatatttggactgctttgaggccttcattggaaacgggaatatcttcacataaacactagacagaagcattctctgaaacttctttgtgatgtgtgtattcaactcacagagttgaaccatcttttttatggagcggttttgaaacagtgtttttgtagaatcaacaagtggatattgggagcgctttgaggcctctggtggaaagggaatgtcttcacataaaaactggacagaagcattctcagaaacatctttgtgatgtttgcattcaactcacagagttgatccttccttttaatagggcagttttgcaacactctttttgtagaatgcaccagtgggcttttggggcacgtcaagggctatggtgaaaaaggaaatatcttcacataaaaactagacagaagtattctgtaaaactcctttgtgatgtttgcattcaactcagaaagttgaacttctctttatatagtccagttttcaaacactatttttgtagaatctgcaagtggatactgggactgctttgaggctatcgttggaaacaggattatcttcacataaaaactagactgaaggattcttagaaacttctttgtgatgtgtgcattcaactcaccgagtggaacctcacttttgatagagcagtgttgaaagacacttgttgtagaatctgcaggtggatatttggagtgctttgaagccttccttggaaacgggaatatcttcacataaaaactagacataagcattctcagaaactcctttgtgatctgtccattcagctcacagagttgaaccttccttttgatagagcagttttgaaacactctttctgtagagtctgcaagtggatatcaggagcgctttgaggcctatggtagaaaaagaaatatctgcatataaaaactagacagaagcattctgagaaacttctttgtgatgtttgcattcaactaccagagttgaaccttccttttgatagagcagttttgaaacactctttgtgtagaatctgcatgtggatatcaggagcgctttgaggcctatggcagaaaaagaaatatctggctctaaaaactagacagaagcattctgagaaacttctttgtgatgtttgcattcaactaccagagttgaaccttccttttgatagagcagttttgaaacactctttgtgtagaatctgcatgtggatatctggagcgatttgaggcctatggtcaaaaaggaaatatcttcctatgaaaaacagacaaaagcattctcagaaactacttagagatatgtgcattcaactcacagagttgaaacttttttttgatagagcagttttgaaacaatctgtagaatctgaaagtggatatttggagctatttgagggctatggtggaaaagaaaatatattcccattaaactagacagaagcatcctcagaaacttctttgtgatgtttgcattaaactcacagagttgaacatacctttccatagagcagttttgaaacactctttttggggaatccgcaagtggatatttggaccgctttgagacctttgctggaaatgggaatatcttcacatataaactagacagaagcattctcggaaacttcttcgtgatgtgtgcattctgctcccaaagttgaaccttccttttcataaagcagttttgaaacactcttttgtacaatctaccattggatatgtggaaggatttgatgcccatggtagaaaaggaaacatcctcatataaaatctagacagaaggattcacagaaactgctgtgtgatgtgtgcatccaaatcacggagttgaacttttcttttgttagagcagttttgaaaccctgtttccgtggaatctgccagtggacatttggagcgcattgagggctatggtggagaaggaaatatcttcacataaaaactagaaagaagcattctcagaaacatctatgtgaagtgtgcattcaactcacagagttgaaccttccttttgatagaagagttttgaaacactcttttgtacaattgcaggtgaatatttggagcgctttgaagcctttgttggaaatgggaatatcctcacataaaaactagccagaagcattctcagaaacttctttgtgatgtgtgcattgaacccagagagatgaaccgttcctttgagagagcagttttgaaacgtgtttttgtaagatctgcaagtggatattaggggcgctttgagtccttaggtggaaacgggaatatcttcgaataaaaactagacagaattattctcagaatcttctttgtgatgtgggcattcaactaacacagttgaacatttcttttgacagagcagttctgaaacactctttttgtagaatccgccagtggatatttggagcgctttgagggctattgtgcaaatggaaatatcttcacctaaaaactagaccgaagcaatcccagaaactactttgtgatgtttgcattcaactcacagagttgaacctacctcttcatagagcagtttggaaaacctctttttgtagaatctgcaagtggatatttggaccactttgaggccttcataggaaacagtactatcttcacataaaaactaggtagaagcattctcagaaacttctttgtgatgtgtgaattcaactcacagtgttgaaccttcctttaatagagcagttttgaaacactctttttgtagaatctgccagtagatatttggagcgctttgaggccttcgttggaaaccggaatatcttcacataaaaagtagatagaggcattctcagaaacttttttgtgatatgtagattcaactcacagcgctgaacctttcttttgatagagcagttttgaaaaactcttttatcgaatctgcaagtagacatttggagtgctttgagggctgtggtcgaaaaggaaatatcttcacatagaaactagactgaagcattctcagcaacttctttgtgacgtttgcattcatctcacagtgttgaacataccttttcatagagcagttttgaaacactatttttgtagtatctgcaagtggatatttggactgctttgaggccttcattggaaacgggaatatcttcacataaacactagacagaagcattctctgaaacttctttgtgatgtgtgtattcaactcacagagttgaaccatcttttttatggagcggttttgaaacagtgttttttgtagaatcagcaattggatattgggagcgctttgaggcctctggtggaaagggaatgtcttcacataaaaactggacagaagcattctcagaaacatctttgtgatgtttgcattcaactcacagagttgatccttccttttaatagggcagttttgcaacactctttttgtagaatgcaccagtgggcttttggggcacgtcaagggctatggtgaaaaaggaaatatcttcacataaaaactagacagaagtattctgtaaaactcctttgtgatgtttgcattcaactcagaaagttgaacttctctttatatagtccagttttcaaacactatttttgtagaatctgcaagtggatactgggactgctttgaggctatcgttggaaacaggattatcttcacataaaaactagactgaaggattcttagaaacttctttgtgatgtgtgcattcaactcaccgagtggaacctcacttttgatagagcagtgttgaaagacacttgttgtagaatctgcaggtggatatttggagtgctttgaagccttccttggaaacgggaatatcttcacataaaaactagacataagcattctcagaaactcctttgtgatctgtccattcagctcacagagttgaaccttccttttgatagagcagttttgaaacactctttctgtagagtctgcaagtggatatcaggagcgctttgaggcctatggtagaaaaagaaatatctgcatataaaaactagacagaagcattctgagaaacttctttgtgatgtttgcattcaactaccagagttgaaccttccttttgatagagcagttttgaaacactctttgtgtagaatctgcatgtggatatcaggagcgctttgaggcctatggcagaaaaagaaatatctggctctaaaaactagacagaagcattctgagaaacttctttgtgatgtttgcattcaactaccagagttgaaccttccttttgatagagcagttttgaaacactctttgtgtagaatctgcatgtggatatctggagcgatttgaggcctatggtcaaaaaggaaatatcttcctatgaaaaacagacaaaagcattctcagaaactacttagagatatgtgcattcaactcacagagttgaaacttttttttgatagagcagttttgaaacaatctgtagaatctgaaagtggatatttggagctatttgagggctatggtggaaaagaaaatatattcccattaaactagacagaagcatcctcagaaacttctttgtgatgtttgcattaaactcacagagttgaacatacctttccatagagcagttttgaaacactctttttggggaatccgcaagtggatatttggaccgctttgagacctttgctggaaatgggaatatcttcacatataaactagacagaagcattcttggaaacttcttcgtgatgtgtgcattctgctcccaaagttgaaccttccttttcataaagcagttttgaaacactcttttgtacaatctaccattggatatgtggaaggctttgatgcccatggtagaaaaggaaagatcctcatataaaatctagacagaaggattcacagaaactgctgtgtgatgtgtgcatccaaatcacggagttgaacttttcttttgttagagcagttttgaaaccctgtttccgtggaatctgccagtggacatttggagcgcattgagggctatggtggagaaggaaatatcttcacataaaaactagaaagaagcattctcagaaacatctatgtgaagtgtgcattcaactcacagagttgaaccttccttttgatagaagagttttgaaacactcttttgtacaattgcaggtgaatatttggagcgctttgaagcctttgttggaaatgggaatatcctcacataaaaactagccagaagcattctcagaaacttctttgtgatgtgtgcattgaacccagagagatgaaccgttcctttgagagagcagttttgaaacgtgtttttgtaagatctgcaagtggatattaggggcgctttgagtccttaggtggaaacgggaatatcttcgaataaaaactagacagaattattctcagaatcttctttgtgatgtgggcattcaactaacacagttgaacatttcttttgacagagcagttctgaaacactctttttgtagaatccgccagtggatatttggagcgctttgagggctattgtgcaaatggaaatatcttcacctaaaaactagaccgaagcaatcccagaaactactttgtgatgtttgcattcaactcacagagttgaacctacctcttcatagagcagtttggaaaacctctttttgtagaatctgcaagtggatatttggaccactttgaggccttcataggaaacagtactatcttcacataaaaactaggtagaagcattctcagaaacttctttgtgatgtgtgaattcnnnnnnnnnnnnnnnnnnnnnnnnnnnnnnnnnnnnnnnnnnnnnnnnnnnnnnnnnnnnnnnnnnnnnnnnnnnnnnnnnnnnnnnnnnnnnnnnnnnnnnnnnnnnnnnnnnnnnnnnnnnnnnnnnnnnnnnnnnnnnnnnnnnnnnnnnnnnnnnnnnnnnnnnnnnnnnnnnnnnnnnnnnnnnnnnnnnnnnnnnnnnnnnnnnnnnnnnnnnnnnnnnnnnnnnnnnnnnnnnnnnnnnnnnnnnnnnnnnnnnnnnnnnnnnnnnnnnnnnnnnnnnnnnnnnnnnnnnnnnnnnnnnnnnnnnnnnnnnnnnnnnnnnnnnnnnnnnnnnnnnnnnnnnnnnnnnnnnnnnnnnnnnnnnnnnnnnnnnnnnnnnnnnnnnnnnnnnnnnnnnnnnnnnnnnnnnnnnnnnnnnnnnnnnnnnnnnnnnnnnnnnnnnnnnnnnnnnnnnnnnnnnnnnnnnnnnnnnnnnnnnnnnnnnnnnnnnnnnnnnnnnnnnnnnnnnnnnnnnnnnnnnnnnnnnnnnnnnnnnnnnnnnnnnnnnnnnnnnnnnnnnnnnnnnnnnnnnnnnnnnnnnnnnnnnnnnnnnnnnnnnnnnnnnnnnnnnnnnnnnnnnnnnnnnnnnnnnnnnnnnnnnnnnnnnnnnnnnnnnnnnnnnnnnnnnnnnnnnnnnnnnnnnnnnnnnnnnnnnnnnnnnnnnnnnnnnnnnnnnnnnnnnnnnnnnnnnnnnnnnnnnnnnnnnnnnnnnnnnnnnnnnnnnnnnnnnnnnnnnnnnnnnnnnnnnnnnnnnnnnnnnnnnnnnnnnnnnnnnnnnnnnnnnnnnnnnnnnnnnnnnnnnnnnnnnnnnnnnnnnnnnnnnnnnnnnnnnnnnnnnnnnnnnnnnnnnnnnnnnnnnnnnnnnnnnnnnnnnnnnnnnnnnnnnnnnnnnnnnnnnnnnnnnnnnnnnnnnnnnnnnnnnnnnnnnnnnnnnnnnnnnnnnnnnnnnnnnnnnnnnnnnnnnnnnnnnnnnnnnnnnnnnnnnnnnnnnnnnnnnnnnnnnnnnnnnnnnnnnnnnnnnnnnnnnnnnnnnnnnnnnnnnnnnnnnnnnnnnnnnnnnnnnnnnnnnnnnnnnnnnnnnnnnnnnnnnnnnnnnnnnnnnnnnnnnnnnnnnnnnnnnnnnnnnnnnnnnnnnnnnnnnnnnnnnnnnnnnnnnnnnnnnnnnnnnnnnnnnnnnnnnnnnnnnnnnnnnnnnnnnnnnnnnnnnnnnnnnnnnnnnnnnnnnnnnnnnnnnnnnnnnnnnnnnnnnnnnnnnnnnnnnnnnnnnnnnnnnnnnnnnnnnnnnnnnnnnnnnnnnnnnnnnnnnnnnnnnnnnnnnnnnnnnnnnnnnnnnnnnnnnnnnnnnnnnnnnnnnnnnnnnnnnnnnnnnnnnnnnnnnnnnnnnnnnnnnnnnnnnnnnnnnnnnnnnnnnnnnnnnnnnnnnnnnnnnnnnnnnnnnnnnnnnnnnnnnnnnnnnnnnnnnnnnnnnnnnnnnnnnnnnnnnnnnnnnnnnnnnnnnnnnnnnnnnnnnnnnnnnnnnnnnnnnnnnnnnnnnnnnnnnnnnnnnnnnnnnnnnnnnnnnnnnnnnnnnnnnnnnnnnnnnnnnnnnnnnnnnnnnnnnnnnnnnnnnnnnnnnnnnnnnnnnnnnnnnnnnnnnnnnnnnnnnnnnnnnnnnnnnnnnnnnnnnnnnnnnnnnnnnnnnnnnnnnnnnnnnnnnnnnnnnnnnnnnnnnnnnnnnnnnnnnnnnnnnnnnnnnnnnnnnnnnnnnnnnnnnnnnnnnnnnnnnnnnnnnnnnnnnnnnnnnnnnnnnnnnnnnnnnnnnnnnnnnnnnnnnnnnnnnnnnnnnnnnnnnnnnnnnnnnnnnnnnnnnnnnnnnnnnnnnnnnnnnnnnnnnnnnnnnnnnnnnnnnnnnnnnnnnnnnnnnnnnnnnnnnnnnnnnnnnnnnnnnnnnnnnnnnnnnnnnnnnnnnnnnnnnnnnnnnnnnnnnnnnnnnnnnnnnnnnnnnnnnnnnnnnnnnnnnnnnnnnnnnnnnnnnnnnnnnnnnnnnnnnnnnnnnnnnnnnnnnnnnnnnnnnnnnnnnnnnnnnnnnnnnnnnnnnnnnnnnnnnnnnnnnnnnnnnnnnnnnnnnnnnnnnnnnnnnnnnnnnnnnnnnnnnnnnnnnnnnnnnnnnnnnnnnnnnnnnnnnnnnnnnnnnnnnnnnnnnnnnnnnnnnnnnnnnnnnnnnnnnnnnnnnnnnnnnnnnnnnnnnnnnnnnnnnnnnnnnnnnnnnnnnnnnnnnnnnnnnnnnnnnnnnnnnnnnnnnnnnnnnnnnnnnnnnnnnnnnnnnnnnnnnnnnnnnnnnnnnnnnnnnnnnnnnnnnnnnnnnnnnnnnnnnnnnnnnnnnnnnnnnnnnnnnnnnnnnnnnnnnnnnnnnnnnnnnnnnnnnnnnnnnnnnnnnnnnnnnnnnnnnnnnnnnnnnnnnnnnnnnnnnnnnnnnnnnnnnnnnnnnnnnnnnnnnnnnnnnnnnnnnnnnnnnnnnnnnnnnnnnnnnnnnnnnnnnnnnnnnnnnnnnnnnnnnnnnnnnnnnnnnnnnnnnnnnnnnnnnnnnnnnnnnnnnnnnnnnnnnnnnnnnnnnnnnnnnnnnnnnnnnnnnnnnnnnnnnnnnnnnnnnnnnnnnnnnnnnnnnnnnnnnnnnnnnnnnnnnnnnnnnnnnnnnnnnnnnnnnnnnnnnnnnnnnnnnnnnnnnnnnnnnnnnnnnnnnnnnnnnnnnnnnnnnnnnnnnnnnnnnnnnnnnnnnnnnnnnnnnnnnnnnnnnnnnnnnnnnnnnnnnnnnnnnnnnnnnnnnnnnnnnnnnnnnnnnnnnnnnnnnnnnnnnnnnnnnnnnnnnnnnnnnnnnnnnnnnnnnnnnnnnnnnnnnnnnnnnnnnnnnnnnnnnnnnnnnnnnnnnnnnnnnnnnnnnnnnnnnnnnnnnnnnnnnnnnnnnnnnnnnnnnnnnnnnnnnnnnnnnnnnnnnnnnnnnnnnnnnnnnnnnnnnnnnnnnnnnnnnnnnnnnnnnnnnnnnnnnnnnnnnnnnnnnnnnnnnnnnnnnnnnnnnnnnnnnnnnnnnnnnnnnnnnnnnnnnnnnnnnnnnnnnnnnnnnnnnnnnnnnnnnnnnnnnnnnnnnnnnnnnnnnnnnnnnnnnnnnnnnnnnnnnnnnnnnnnnnnnnnnnnnnnnnnnnnnnnnnnnnnnnnnnnnnnnnnnnnnnnnnnnnnnnnnnnnnnnnnnnnnnnnnnnnnnnnnnnnnnnnnnnnnnnnnnnnnnnnnnnnnnnnnnnnnnnnnnnnnnnnnnnnnnnnnnnnnnnnnnnnnnnnnnnnnnnnnnnnnnnnnnnnnnnnnnnnnnnnnnnnnnnnnnnnnnnnnnnnnnnnnnnnnnnnnnnnnnnnnnnnnnnnnnnnnnnnnnnnnnnnnnnnnnnnnnnnnnnnnnnnnnnnnnnnnnnnnnnnnnnnnnnnnnnnnnnnnnnnnnnnnnnnnnnnnnnnnnnnnnnnnnnnnnnnnnnnnnnnnnnnnnnnnnnnnnnnnnnnnnnnnnnnnnnnnnnnnnnnnnnnnnnnnnnnnnnnnnnnnnnnnnnnnnnnnnnnnnnnnnnnnnnnnnnnnnnnnnnnnnnnnnnnnnnnnnnnnnnnnnnnnnnnnnnnnnnnnnnnnnnnnnnnnnnnnnnnnnnnnnnnnnnnnnnnnnnnnnnnnnnnnnnnnnnnnnnnnnnnnnnnnnnnnnnnnnnnnnnnnnnnnnnnnnnnnnnnnnnnnnnnnnnnnnnnnnnnnnnnnnnnnnnnnnnnnnnnnnnnnnnnnnnnnnnnnnnnnnnnnnnnnnnnnnnnnnnnnnnnnnnnnnnnnnnnnnnnnnnnnnnnnnnnnnnnnnnnnnnnnnnnnnnnnnnnnnnnnnnnnnnnnnnnnnnnnnnnnnnnnnnnnnnnnnnnnnnnnnnnnnnnnnnnnnnnnnnnnnnnnnnnnnnnnnnnnnnnnnnnnnnnnnnnnnnnnnnnnnnnnnnnnnnnnnnnnnnnnnnnnnnnnnnnnnnnnnnnnnnnnnnnnnnnnnnnnnnnnnnnnnnnnnnnnnnnnnnnnnnnnnnnnnnnnnnnnnnnnnnnnnnnnnnnnnnnnnnnnnnnnnnnnnnnnnnnnnnnnnnnnnnnnnnnnnnnnnnnnnnnnnnnnnnnnnnnnnnnnnnnnnnnnnnnnnnnnnnnnnnnnnnnnnnnnnnnnnnnnnnnnnnnnnnnnnnnnnnnnnnnnnnnnnnnnnnnnnnnnnnnnnnnnnnnnnnnnnnnnnnnnnnnnnnnnnnnnnnnnnnnnnnnnnnnnnnnnnnnnnnnnnnnnnnnnnnnnnnnnnnnnnnnnnnnnnnnnnnnnnnnnnnnnnnnnnnnnnnnnnnnnnnnnnnnnnnnnnnnnnnnnnnnnnnnnnnnnnnnnnnnnnnnnnnnnnnnnnnnnnnnnnnnnnnnnnnnnnnnnnnnnnnnnnnnnnnnnnnnnnnnnnnnnnnnnnnnnnnnnnnnnnnnnnnnnnnnnnnnnnnnnnnnnnnnnnnnnnnnnnnnnnnnnnnnnnnnnnnnnnnnnnnnnnnnnnnnnnnnnnnnnnnnnnnnnnnnnnnnnnnnnnnnnnnnnnnnnnnnnnnnnnnnnnnnnnnnnnnnnnnnnnnnnnnnnnnnnnnnnnnnnnnnnnnnnnnnnnnnnnnnnnnnnnnnnnnnnnnnnnnnnnnnnnnnnnnnnnnnnnnnnnnnnnnnnnnnnnnnnnnnnnnnnnnnnnnnnnnnnnnnnnnnnnnnnnnnnnnnnnnnnnnnnnnnnnnnnnnnnnnnnnnnnnnnnnnnnnnnnnnnnnnnnnnnnnnnnnnnnnnnnnnnnnnnnnnnnnnnnnnnnnnnnnnnnnnnnnnnnnnnnnnnnnnnnnnnnnnnnnnnnnnnnnnnnnnnnnnnnnnnnnnnnnnnnnnnnnnnnnnnnnnnnnnnnnnnnnnnnnnnnnnnnnnnnnnnnnnnnnnnnnnnnnnnnnnnnnnnnnnnnnnnnnnnnnnnnnnnnnnnnnnnnnnnnnnnnnnnnnnnnnnnnnnnnnnnnnnnnnnnnnnnnnnnnnnnnnnnnnnnnnnnnnnnnnnnnnnnnnnnnnnnnnnnnnnnnnnnnnnnnnnnnnnnnnnnnnnnnnnnnnnnnnnnnnnnnnnnnnnnnnnnnnnnnnnnnnnnnnnnnnnnnnnnnnnnnnnnnnnnnnnnnnnnnnnnnnnnnnnnnnnnnnnnnnnnnnnnnnnnnnnnnnnnnnnnnnnnnnnnnnnnnnnnnnnnnnnnnnnnnnnnnnnnnnnnnnnnnnnnnnnnnnnnnnnnnnnnnnnnnnnnnnnnnnnnnnnnnnnnnnnnnnnnnnnnnnnnnnnnnnnnnnnnnnnnnnnnnnnnnnnnnnnnnnnnnnnnnnnnnnnnnnnnnnnnnnnnnnnnnnnnnnnnnnnnnnnnnnnnnnnnnnnnnnnnnnnnnnnnnnnnnnnnnnnnnnnnnnnnnnnnnnnnnnnnnnnnnnnnnnnnnnnnnnnnnnnnnnnnnnnnnnnnnnnnnnnnnnnnnnnnnnnnnnnnnnnnnnnnnnnnnnnnnnnnnnnnnnnnnnnnnnnnnnnnnnnnnnnnnnnnnnnnnnnnnnnnnnnnnnnnnnnnnnnnnnnnnnnnnnnnnnnnnnnnnnnnnnnnnnnnnnnnnnnnnnnnnnnnnnnnnnnnnnnnnnnnnnnnnnnnnnnnnnnnnnnnnnnnnnnnnnnnnnnnnnnnnnnnnnnnnnnnnnnnnnnnnnnnnnnnnnnnnnnnnnnnnnnnnnnnnnnnnnnnnnnnnnnnnnnnnnnnnnnnnnnnnnnnnnnnnnnnnnnnnnnnnnnnnnnnnnnnnnnnnnnnnnnnnnnnnnnnnnnnnnnnnnnnnnnnnnnnnnnnnnnnnnnnnnnnnnnnnnnnnnnnnnnnnnnnnnnnnnnnnnnnnnnnnnnnnnnnnnnnnnnnnnnnnnnnnnnnnnnnnnnnnnnnnnnnnnnnnnnnnnnnnnnnnnnnnnnnnnnnnnnnnnnnnnnnnnnnnnnnnnnnnnnnnnnnnnnnnnnnnnnnnnnnnnnnnnnnnnnnnnnnnnnnnnnnnnnnnnnnnnnnnnnnnnnnnnnnnnnnnnnnnnnnnnnnnnnnnnnnnnnnnnnnnnnnnnnnnnnnnnnnnnnnnnnnnnnnnnnnnnnnnnnnnnnnnnnnnnnnnnnnnnnnnnnnnnnnnnnnnnnnnnnnnnnnnnnnnnnnnnnnnnnnnnnnnnnnnnnnnnnnnnnnnnnnnnnnnnnnnnnnnnnnnnnnnnnnnnnnnnnnnnnnnnnnnnnnnnnnnnnnnnnnnnnnnnnnnnnnnnnnnnnnnnnnnnnnnnnnnnnnnnnnnnnnnnnnnnnnnnnnnnnnnnnnnnnnnnnnnnnnnnnnnnnnnnnnnnnnnnnnnnnnnnnnnnnnnnnnnnnnnnnnnnnnnnnnnnnnnnnnnnnnnnnnnnnnnnnnnnnnnnnnnnnnnnnnnnnnnnnnnnnnnnnnnnnnnnnnnnnnnnnnnnnnnnnnnnnnnnnnnnnnnnnnnnnnnnnnnnnnnnnnnnnnnnnnnnnnnnnnnnnnnnnnnnnnnnnnnnnnnnnnnnnnnnnnnnnnnnnnnnnnnnnnnnnnnnnnnnnnnnnnnnnnnnnnnnnnnnnnnnnnnnnnnnnnnnnnnnnnnnnnnnnnnnnnnnnnnnnnnnnnnnnnnnnnnnnnnnnnnnnnnnnnnnnnnnnnnnnnnnnnnnnnnnnnnnnnnnnnnnnnnnnnnnnnnnnnnnnnnnnnnnnnnnnnnnnnnnnnnnnnnnnnnnnnnnnnnnnnnnnnnnnnnnnnnnnnnnnnnnnnnnnnnnnnnnnnnnnnnnnnnnnnnnnnnnnnnnnnnnnnnnnnnnnnnnnnnnnnnnnnnnnnnnnnnnnnnnnnnnnnnnnnnnnnnnnnnnnnnnnnnnnnnnnnnnnnnnnnnnnnnnnnnnnnnnnnnnnnnnnnnnnnnnnnnnnnnnnnnnnnnnnnnnnnnnnnnnnnnnnnnnnnnnnnnnnnnnnnnnnnnnnnnnnnnnnnnnnnnnnnnnnnnnnnnnnnnnnnnnnnnnnnnnnnnnnnnnnnnnnnnnnnnnnnnnnnnnnnnnnnnnnnnnnnnnnnnnnnnnnnnnnnnnnnnnnnnnnnnnnnnnnnnnnnnnnnnnnnnnnnnnnnnnnnnnnnnnnnnnnnnnnnnnnnnnnnnnnnnnnnnnnnnnnnnnnnnnnnnnnnnnnnnnnnnnnnnnnnnnnnnnnnnnnnnnnnnnnnnnnnnnnnnnnnnnnnnnnnnnnnnnnnnnnnnnnnnnnnnnnnnnnnnnnnnnnnnnnnnnnnnnnnnnnnnnnnnnnnnnnnnnnnnnnnnnnnnnnnnnnnnnnnnnnnnnnnnnnnnnnnnnnnnnnnnnnnnnnnnnnnnnnnnnnnnnnnnnnnnnnnnnnnnnnnnnnnnnnnnnnnnnnnnnnnnnnnnnnnnnnnnnnnnnnnnnnnnnnnnnnnnnnnnnnnnnnnnnnnnnnnnnnnnnnnnnnnnnnnnnnnnnnnnnnnnnnnnnnnnnnnnnnnnnnnnnnnnnnnnnnnnnnnnnnnnnnnnnnnnnnnnnnnnnnnnnnnnnnnnnnnnnnnnnnnnnnnnnnnnnnnnnnnnnnnnnnnnnnnnnnnnnnnnnnnnnnnnnnnnnnnnnnnnnnnnnnnnnnnnnnnnnnnnnnnnnnnnnnnnnnnnnnnnnnnnnnnnnnnnnnnnnnnnnnnnnnnnnnnnnnnnnnnnnnnnnnnnnnnnnnnnnnnnnnnnnnnnnnnnnnnnnnnnnnnnnnnnnnnnnnnnnnnnnnnnnnnnnnnnnnnnnnnnnnnnnnnnnnnnnnnnnnnnnnnnnnnnnnnnnnnnnnnnnnnnnnnnnnnnnnnnnnnnnnnnnnnnnnnnnnnnnnnnnnnnnnnnnnnnnnnnnnnnnnnnnnnnnnnnnnnnnnnnnnnnnnnnnnnnnnnnnnnnnnnnnnnnnnnnnnnnnnnnnnnnnnnnnnnnnnnnnnnnnnnnnnnnnnnnnnnnnnnnnnnnnnnnnnnnnnnnnnnnnnnnnnnnnnnnnnnnnnnnnnnnnnnnnnnnnnnnnnnnnnnnnnnnnnnnnnnnnnnnnnnnnnnnnnnnnnnnnnnnnnnnnnnnnnnnnnnnnnnnnnnnnnnnnnnnnnnnnnnnnnnnnnnnnnnnnnnnnnnnnnnnnnnnnnnnnnnnnnnnnnnnnnnnnnnnnnnnnnnnnnnnnnnnnnnnnnnnnnnnnnnnnnnnnnnnnnnnnnnnnnnnnnnnnnnnnnnnnnnnnnnnnnnnnnnnnnnnnnnnnnnnnnnnnnnnnnnnnnnnnnnnnnnnnnnnnnnnnnnnnnnnnnnnnnnnnnnnnnnnnnnnnnnnnnnnnnnnnnnnnnnnnnnnnnnnnnnnnnnnnnnnnnnnnnnnnnnnnnnnnnnnnnnnnnnnnnnnnnnnnnnnnnnnnnnnnnnnnnnnnnnnnnnnnnnnnnnnnnnnnnnnnnnnnnnnnnnnnnnnnnnnnnnnnnnnnnnnnnnnnnnnnnnnnnnnnnnnnnnnnnnnnnnnnnnnnnnnnnnnnnnnnnnnnnnnnnnnnnnnnnnnnnnnnnnnnnnnnnnnnnnnnnnnnnnnnnnnnnnnnnnnnnnnnnnnnnnnnnnnnnnnnnnnnnnnnnnnnnnnnnnnnnnnnnnnnnnnnnnnnnnnnnnnnnnnnnnnnnnnnnnnnnnnnnnnnnnnnnnnnnnnnnnnnnnnnnnnnnnnnnnnnnnnnnnnnnnnnnnnnnnnnnnnnnnnnnnnnnnnnnnnnnnnnnnnnnnnnnnnnnnnnnnnnnnnnnnnnnnnnnnnnnnnnnnnnnnnnnnnnnnnnnnnnnnnnnnnnnnnnnnnnnnnnnnnnnnnnnnnnnnnnnnnnnnnnnnnnnnnnnnnnnnnnnnnnnnnnnnnnnnnnnnnnnnnnnnnnnnnnnnnnnnnnnnnnnnnnnnnnnnnnnnnnnnnnnnnnnnnnnnnnnnnnnnnnnnnnnnnnnnnnnnnnnnnnnnnnnnnnnnnnnnnnnnnnnnnnnnnnnnnnnnnnnnnnnnnnnnnnnnnnnnnnnnnnnnnnnnnnnnnnnnnnnnnnnnnnnnnnnnnnnnnnnnnnnnnnnnnnnnnnnnnnnnnnnnnnnnnnnnnnnnnnnnnnnnnnnnnnnnnnnnnnnnnnnnnnnnnnnnnnnnnnnnnnnnnnnnnnnnnnnnnnnnnnnnnnnnnnnnnnnnnnnnnnnnnnnnnnnnnnnnnnnnnnnnnnnnnnnnnnnnnnnnnnnnnnnnnnnnnnnnnnnnnnnnnnnnnnnnnnnnnnnnnnnnnnnnnnnnnnnnnnnnnnnnnnnnnnnnnnnnnnnnnnnnnnnnnnnnnnnnnnnnnnnnnnnnnnnnnnnnnnnnnnnnnnnnnnnnnnnnnnnnnnnnnnnnnnnnnnnnnnnnnnnnnnnnnnnnnnnnnnnnnnnnnnnnnnnnnnnnnnnnnnnnnnnnnnnnnnnnnnnnnnnnnnnnnnnnnnnnnnnnnnnnnnnnnnnnnnnnnnnnnnnnnnnnnnnnnnnnnnnnnnnnnnnnnnnnnnnnnnnnnnnnnnnnnnnnnnnnnnnnnnnnnnnnnnnnnnnnnnnnnnnnnnnnnnnnnnnnnnnnnnnnnnnnnnnnnnnnnnnnnnnnnnnnnnnnnnnnnnnnnnnnnnnnnnnnnnnnnnnnnnnnnnnnnnnnnnnnnnnnnnnnnnnnnnnnnnnnnnnnnnnnnnnnnnnnnnnnnnnnnnnnnnnnnnnnnnnnnnnnnnnnnnnnnnnnnnnnnnnnnnnnnnnnnnnnnnnnnnnnnnnnnnnnnnnnnnnnnnnnnnnnnnnnnnnnnnnnnnnnnnnnnnnnnnnnnnnnnnnnnnnnnnnnnnnnnnnnnnnnnnnnnnnnnnnnnnnnnnnnnnnnnnnnnnnnnnnnnnnnnnnnnnnnnnnnnnnnnnnnnnnnnnnnnnnnnnnnnnnnnnnnnnnnnnnnnnnnnnnnnnnnnnnnnnnnnnnnnnnnnnnnnnnnnnnnnnnnnnnnnnnnnnnnnnnnnnnnnnnnnnnnnnnnnnnnnnnnnnnnnnnnnnnnnnnnnnnnnnnnnnnnnnnnnnnnnnnnnnnnnnnnnnnnnnnnnnnnnnnnnnnnnnnnnnnnnnnnnnnnnnnnnnnnnnnnnnnnnnnnnnnnnnnnnnnnnnnnnnnnnnnnnnnnnnnnnnnnnnnnnnnnnnnnnnnnnnnnnnnnnnnnnnnnnnnnnnnnnnnnnnnnnnnnnnnnnnnnnnnnnnnnnnnnnnnnnnnnnnnnnnnnnnnnnnnnnnnnnnnnnnnnnnnnnnnnnnnnnnnnnnnnnnnnnnnnnnnnnnnnnnnnnnnnnnnnnnnnnnnnnnnnnnnnnnnnnnnnnnnnnnnnnnnnnnnnnnnnnnnnnnnnnnnnnnnnnnnnnnnnnnnnnnnnnnnnnnnnnnnnnnnnnnnnnnnnnnnnnnnnnnnnnnnnnnnnnnnnnnnnnnnnnnnnnnnnnnnnnnnnnnnnnnnnnnnnnnnnnnnnnnnnnnnnnnnnnnnnnnnnnnnnnnnnnnnnnnnnnnnnnnnnnnnnnnnnnnnnnnnnnnnnnnnnnnnnnnnnnnnnnnnnnnnnnnnnnnnnnnnnnnnnnnnnnnnnnnnnnnnnnnnnnnnnnnnnnnnnnnnnnnnnnnnnnnnnnnnnnnnnnnnnnnnnnnnnnnnnnnnnnnnnnnnnnnnnnnnnnnnnnnnnnnnnnnnnnnnnnnnnnnnnnnnnnnnnnnnnnnnnnnnnnnnnnnnnnnnnnnnnnnnnnnnnnnnnnnnnnnnnnnnnnnnnnnnnnnnnnnnnnnnnnnnnnnnnnnnnnnnnnnnnnnnnnnnnnnnnnnnnnnnnnnnnnnnnnnnnnnnnnnnnnnnnnnnnnnnnnnnnnnnnnnnnnnnnnnnnnnnnnnnnnnnnnnnnnnnnnnnnnnnnnnnnnnnnnnnnnnnnnnnnnnnnnnnnnnnnnnnnnnnnnnnnnnnnnnnnnnnnnnnnnnnnnnnnnnnnnnnnnnnnnnnnnnnnnnnnnnnnnnnnnnnnnnnnnnnnnnnnnnnnnnnnnnnnnnnnnnnnnnnnnnnnnnnnnnnnnnnnnnnnnnnnnnnnnnnnnnnnnnnnnnnnnnnnnnnnnnnnnnnnnnnnnnnnnnnnnnnnnnnnnnnnnnnnnnnnnnnnnnnnnnnnnnnnnnnnnnnnnnnnnnnnnnnnnnnnnnnnnnnnnnnnnnnnnnnnnnnnnnnnnnnnnnnnnnnnnnnnnnnnnnnnnnnnnnnnnnnnnnnnnnnnnnnnnnnnnnnnnnnnnnnnnnnnnnnnnnnnnnnnnnnnnnnnnnnnnnnnnnnnnnnnnnnnnnnnnnnnnnnnnnnnnnnnnnnnnnnnnnnnnnnnnnnnnnnnnnnnnnnnnnnnnnnnnnnnnnnnnnnnnnnnnnnnnnnnnnnnnnnnnnnnnnnnnnnnnnnnnnnnnnnnnnnnnnnnnnnnnnnnnnnnnnnnnnnnnnnnnnnnnnnnnnnnnnnnnnnnnnnnnnnnnnnnnnnnnnnnnnnnnnnnnnnnnnnnnnnnnnnnnnnnnnnnnnnnnnnnnnnnnnnnnnnnnnnnnnnnnnnnnnnnnnnnnnnnnnnnnnnnnnnnnnnnnnnnnnnnnnnnnnnnnnnnnnnnnnnnnnnnnnnnnnnnnnnnnnnnnnnnnnnnnnnnnnnnnnnnnnnnnnnnnnnnnnnnnnnnnnnnnnnnnnnnnnnnnnnnnnnnnnnnnnnnnnnnnnnnnnnnnnnnnnnnnnnnnnnnnnnnnnnnnnnnnnnnnnnnnnnnnnnnnnnnnnnnnnnnnnnnnnnnnnnnnnnnnnnnnnnnnnnnnnnnnnnnnnnnnnnnnnnnnnnnnnnnnnnnnnnnnnnnnnnnnnnnnnnnnnnnnnnnnnnnnnnnnnnnnnnnnnnnnnnnnnnnnnnnnnnnnnnnnnnnnnnnnnnnnnnnnnnnnnnnnnnnnnnnnnnnnnnnnnnnnnnnnnnnnnnnnnnnnnnnnnnnnnnnnnnnnnnnnnnnnnnnnnnnnnnnnnnnnnnnnnnnnnnnnnnnnnnnnnnnnnnnnnnnnnnnnnnnnnnnnnnnnnnnnnnnnnnnnnnnnnnnnnnnnnnnnnnnnnnnnnnnnnnnnnnnnnnnnnnnnnnnnnnnnnnnnnnnnnnnnnnnnnnnnnnnnnnnnnnnnnnnnnnnnnnnnnnnnnnnnnnnnnnnnnnnnnnnnnnnnnnnnnnnnnnnnnnnnnnnnnnnnnnnnnnnnnnnnnnnnnnnnnnnnnnnnnnnnnnnnnnnnnnnnnnnnnnnnnnnnnnnnnnnnnnnnnnnnnnnnnnnnnnnnnnnnnnnnnnnnnnnnnnnnnnnnnnnnnnnnnnnnnnnnnnnnnnnnnnnnnnnnnnnnnnnnnnnnnnnnnnnnnnnnnnnnnnnnnnnnnnnnnnnnnnnnnnnnnnnnnnnnnnnnnnnnnnnnnnnnnnnnnnnnnnnnnnnnnnnnnnnnnnnnnnnnnnnnnnnnnnnnnnnnnnnnnnnnnnnnnnnnnnnnnnnnnnnnnnnnnnnnnnnnnnnnnnnnnnnnnnnnnnnnnnnnnnnnnnnnnnnnnnnnnnnnnnnnnnnnnnnnnnnnnnnnnnnnnnnnnnnnnnnnnnnnnnnnnnnnnnnnnnnnnnnnnnnnnnnnnnnnnnnnnnnnnnnnnnnnnnnnnnnnnnnnnnnnnnnnnnnnnnnnnnnnnnnnnnnnnnnnnnnnnnnnnnnnnnnnnnnnnnnnnnnnnnnnnnnnnnnnnnnnnnnnnnnnnnnnnnnnnnnnnnnnnnnnnnnnnnnnnnnnnnnnnnnnnnnnnnnnnnnnnnnnnnnnnnnnnnnnnnnnnnnnnnnnnnnnnnnnnnnnnnnnnnnnnnnnnnnnnnnnnnnnnnnnnnnnnnnnnnnnnnnnnnnnnnnnnnnnnnnnnnnnnnnnnnnnnnnnnnnnnnnnnnnnnnnnnnnnnnnnnnnnnnnnnnnnnnnnnnnnnnnnnnnnnnnnnnnnnnnnnnnnnnnnnnnnnnnnnnnnnnnnnnnnnnnnnnnnnnnnnnnnnnnnnnnnnnnnnnnnnnnnnnnnnnnnnnnnnnnnnnnnnnnnnnnnnnnnnnnnnnnnnnnnnnnnnnnnnnnnnnnnnnnnnnnnnnnnnnnnnnnnnnnnnnnnnnnnnnnnnnnnnnnnnnnnnnnnnnnnnnnnnnnnnnnnnnnnnnnnnnnnnnnnnnnnnnnnnnnnnnnnnnnnnnnnnnnnnnnnnnnnnnnnnnnnnnnnnnnnnnnnnnnnnnnnnnnnnnnnnnnnnnnnnnnnnnnnnnnnnnnnnnnnnnnnnnnnnnnnnnnnnnnnnnnnnnnnnnnnnnnnnnnnnnnnnnnnnnnnnnnnnnnnnnnnnnnnnnnnnnnnnnnnnnnnnnnnnnnnnnnnnnnnnnnnnnnnnnnnnnnnnnnnnnnnnnnnnnnnnnnnnnnnnnnnnnnnnnnnnnnnnnnnnnnnnnnnnnnnnnnnnnnnnnnnnnnnnnnnnnnnnnnnnnnnnnnnnnnnnnnnnnnnnnnnnnnnnnnnnnnnnnnnnnnnnnnnnnnnnnnnnnnnnnnnnnnnnnnnnnnnnnnnnnnnnnnnnnnnnnnnnnnnnnnnnnnnnnnnnnnnnnnnnnnnnnnnnnnnnnnnnnnnnnnnnnnnnnnnnnnnnnnnnnnnnnnnnnnnnnnnnnnnnnnnnnnnnnnnnnnnnnnnnnnnnnnnnnnnnnnnnnnnnnnnnnnnnnnnnnnnnnnnnnnnnnnnnnnnnnnnnnnnnnnnnnnnnnnnnnnnnnnnnnnnnnnnnnnnnnnnnnnnnnnnnnnnnnnnnnnnnnnnnnnnnnnnnnnnnnnnnnnnnnnnnnnnnnnnnnnnnnnnnnnnnnnnnnnnnnnnnnnnnnnnnnnnnnnnnnnnnnnnnnnnnnnnnnnnnnnnnnnnnnnnnnnnnnnnnnnnnnnnnnnnnnnnnnnnnnnnnnnnnnnnnnnnnnnnnnnnnnnnnnnnnnnnnnnnnnnnnnnnnnnnnnnnnnnnnnnnnnnnnnnnnnnnnnnnnnnnnnnnnnnnnnnnnnnnnnnnnnnnnnnnnnnnnnnnnnnnnnnnnnnnnnnnnnnnnnnnnnnnnnnnnnnnnnnnnnnnnnnnnnnnnnnnnnnnnnnnnnnnnnnnnnnnnnnnnnnnnnnnnnnnnnnnnnnnnnnnnnnnnnnnnnnnnnnnnnnnnnnnnnnnnnnnnnnnnnnnnnnnnnnnnnnnnnnnnnnnnnnnnnnnnnnnnnnnnnnnnnnnnnnnnnnnnnnnnnnnnnnnnnnnnnnnnnnnnnnnnnnnnnnnnnnnnnnnnnnnnnnnnnnnnnnnnnnnnnnnnnnnnnnnnnnnnnnnnnnnnnnnnnnnnnnnnnnnnnnnnnnnnnnnnnnnnnnnnnnnnnnnnnnnnnnnnnnnnnnnnnnnnnnnnnnnnnnnnnnnnnnnnnnnnnnnnnnnnnnnnnnnnnnnnnnnnnnnnnnnnnnnnnnnnnnnnnnnnnnnnnnnnnnnnnnnnnnnnnnnnnnnnnnnnnnnnnnnnnnnnnnnnnnnnnnnnnnnnnnnnnnnnnnnnnnnnnnnnnnnnnnnnnnnnnnnnnnnnnnnnnnnnnnnnnnnnnnnnnnnnnnnnnnnnnnnnnnnnnnnnnnnnnnnnnnnnnnnnnnnnnnnnnnnnnnnnnnnnnnnnnnnnnnnnnnnnnnnnnnnnnnnnnnnnnnnnnnnnnnnnnnnnnnnnnnnnnnnnnnnnnnnnnnnnnnnnnnnnnnnnnnnnnnnnnnnnnnnnnnnnnnnnnnnnnnnnnnnnnnnnnnnnnnnnnnnnnnnnnnnnnnnnnnnnnnnnnnnnnnnnnnnnnnnnnnnnnnnnnnnnnnnnnnnnnnnnnnnnnnnnnnnnnnnnnnnnnnnnnnnnnnnnnnnnnnnnnnnnnnnnnnnnnnnnnnnnnnnnnnnnnnnnnnnnnnnnnnnnnnnnnnnnnnnnnnnnnnnnnnnnnnnnnnnnnnnnnnnnnnnnnnnnnnnnnnnnnnnnnnnnnnnnnnnnnnnnnnnnnnnnnnnnnnnnnnnnnnnnnnnnnnnnnnnnnnnnnnnnnnnnnnnnnnnnnnnnnnnnnnnnnnnnnnnnnnnnnnnnnnnnnnnnnnnnnnnnnnnnnnnnnnnnnnnnnnnnnnnnnnnnnnnnnnnnnnnnnnnnnnnnnnnnnnnnnnnnnnnnnnnnnnnnnnnnnnnnnnnnnnnnnnnnnnnnnnnnnnnnnnnnnnnnnnnnnnnnnnnnnnnnnnnnnnnnnnnnnnnnnnnnnnnnnnnnnnnnnnnnnnnnnnnnnnnnnnnnnnnnnnnnnnnnnnnnnnnnnnnnnnnnnnnnnnnnnnnnnnnnnnnnnnnnnnnnnnnnnnnnnnnnnnnnnnnnnnnnnnnnnnnnnnnnnnnnnnnnnnnnnnnnnnnnnnnnnnnnnnnnnnnnnnnnnnnnnnnnnnnnnnnnnnnnnnnnnnnnnnnnnnnnnnnnnnnnnnnnnnnnnnnnnnnnnnnnnnnnnnnnnnnnnnnnnnnnnnnnnnnnnnnnnnnnnnnnnnnnnnnnnnnnnnnnnnnnnnnnnnnnnnnnnnnnnnnnnnnnnnnnnnnnnnnnnnnnnnnnnnnnnnnnnnnnnnnnnnnnnnnnnnnnnnnnnnnnnnnnnnnnnnnnnnnnnnnnnnnnnnnnnnnnnnnnnnnnnnnnnnnnnnnnnnnnnnnnnnnnnnnnnnnnnnnnnnnnnnnnnnnnnnnnnnnnnnnnnnnnnnnnnnnnnnnnnnnnnnnnnnnnnnnnnnnnnnnnnnnnnnnnnnnnnnnnnnnnnnnnnnnnnnnnnnnnnnnnnnnnnnnnnnnnnnnnnnnnnnnnnnnnnnnnnnnnnnnnnnnnnnnnnnnnnnnnnnnnnnnnnnnnnnnnnnnnnnnnnnnnnnnnnnnnnnnnnnnnnnnnnnnnnnnnnnnnnnnnnnnnnnnnnnnnnnnnnnnnnnnnnnnnnnnnnnnnnnnnnnnnnnnnnnnnnnnnnnnnnnnnnnnnnnnnnnnnnnnnnnnnnnnnnnnnnnnnnnnnnnnnnnnnnnnnnnnnnnnnnnnnnnnnnnnnnnnnnnnnnnnnnnnnnnnnnnnnnnnnnnnnnnnnnnnnnnnnnnnnnnnnnnnnnnnnnnnnnnnnnnnnnnnnnnnnnnnnnnnnnnnnnnnnnnnnnnnnnnnnnnnnnnnnnnnnnnnnnnnnnnnnnnnnnnnnnnnnnnnnnnnnnnnnnnnnnnnnnnnnnnnnnnnnnnnnnnnnnnnnnnnnnnnnnnnnnnnnnnnnnnnnnnnnnnnnnnnnnnnnnnnnnnnnnnnnnnnnnnnnnnnnnnnnnnnnnnnnnnnnnnnnnnnnnnnnnnnnnnnnnnnnnnnnnnnnnnnnnnnnnnnnnnnnnnnnnnnnnnnnnnnnnnnnnnnnnnnnnnnnnnnnnnnnnnnnnnnnnnnnnnnnnnnnnnnnnnnnnnnnnnnnnnnnnnnnnnnnnnnnnnnnnnnnnnnnnnnnnnnnnnnnnnnnnnnnnnnnnnnnnnnnnnnnnnnnnnnnnnnnnnnnnnnnnnnnnnnnnnnnnnnnnnnnnnnnnnnnnnnnnnnnnnnnnnnnnnnnnnnnnnnnnnnnnnnnnnnnnnnnnnnnnnnnnnnnnnnnnnnnnnnnnnnnnnnnnnnnnnnnnnnnnnnnnnnnnnnnnnnnnnnnnnnnnnnnnnnnnnnnnnnnnnnnnnnnnnnnnnnnnnnnnnnnnnnnnnnnnnnnnnnnnnnnnnnnnnnnnnnnnnnnnnnnnnnnnnnnnnnnnnnnnnnnnnnnnnnnnnnnnnnnnnnnnnnnnnnnnnnnnnnnnnnnnnnnnnnnnnnnnnnnnnnnnnnnnnnnnnnnnnnnnnnnnnnnnnnnnnnnnnnnnnnnnnnnnnnnnnnnnnnnnnnnnnnnnnnnnnnnnnnnnnnnnnnnnnnnnnnnnnnnnnnnnnnnnnnnnnnnnnnnnnnnnnnnnnnnnnnnnnnnnnnnnnnnnnnnnnnnnnnnnnnnnnnnnnnnnnnnnnnnnnnnnnnnnnnnnnnnnnnnnnnnnnnnnnnnnnnnnnnnnnnnnnnnnnnnnnnnnnnnnnnnnnnnnnnnnnnnnnnnnnnnnnnnnnnnnnnnnnnnnnnnnnnnnnnnnnnnnnnnnnnnnnnnnnnnnnnnnnnnnnnnnnnnnnnnnnnnnnnnnnnnnnnnnnnnnnnnnnnnnnnnnnnnnnnnnnnnnnnnnnnnnnnnnnnnnnnnnnnnnnnnnnnnnnnnnnnnnnnnnnnnnnnnnnnnnnnnnnnnnnnnnnnnnnnnnnnnnnnnnnnnnnnnnnnnnnnnnnnnnnnnnnnnnnnnnnnnnnnnnnnnnnnnnnnnnnnnnnnnnnnnnnnnnnnnnnnnnnnnnnnnnnnnnnnnnnnnnnnnnnnnnnnnnnnnnnnnnnnnnnnnnnnnnnnnnnnnnnnnnnnnnnnnnnnnnnnnnnnnnnnnnnnnnnnnnnnnnnnnnnnnnnnnnnnnnnnnnnnnnnnnnnnnnnnnnnnnnnnnnnnnnnnnnnnnnnnnnnnnnnnnnnnnnnnnnnnnnnnnnnnnnnnnnnnnnnnnnnnnnnnnnnnnnnnnnnnnnnnnnnnnnnnnnnnnnnnnnnnnnnnnnnnnnnnnnnnnnnnnnnnnnnnnnnnnnnnnnnnnnnnnnnnnnnnnnnnnnnnnnnnnnnnnnnnnnnnnnnnnnnnnnnnnnnnnnnnnnnnnnnnnnnnnnnnnnnnnnnnnnnnnnnnnnnnnnnnnnnnnnnnnnnnnnnnnnnnnnnnnnnnnnnnnnnnnnnnnnnnnnnnnnnnnnnnnnnnnnnnnnnnnnnnnnnnnnnnnnnnnnnnnnnnnnnnnnnnnnnnnnnnnnnnnnnnnnnnnnnnnnnnnnnnnnnnnnnnnnnnnnnnnnnnnnnnnnnnnnnnnnnnnnnnnnnnnnnnnnnnnnnnnnnnnnnnnnnnnnnnnnnnnnnnnnnnnnnnnnnnnnnnnnnnnnnnnnnnnnnnnnnnnnnnnnnnnnnnnnnnnnnnnnnnnnnnnnnnnnnnnnnnnnnnnnnnnnnnnnnnnnnnnnnnnnnnnnnnnnnnnnnnnnnnnnnnnnnnnnnnnnnnnnnnnnnnnnnnnnnnnnnnnnnnnnnnnnnnnnnnnnnnnnnnnnnnnnnnnnnnnnnnnnnnnnnnnnnnnnnnnnnnnnnnnnnnnnnnnnnnnnnnnnnnnnnnnnnnnnnnnnnnnnnnnnnnnnnnnnnnnnnnnnnnnnnnnnnnnnnnnnnnnnnnnnnnnnnnnnnnnnnnnnnnnnnnnnnnnnnnnnnnnnnnnnnnnnnnnnnnnnnnnnnnnnnnnnnnnnnnnnnnnnnnnnnnnnnnnnnnnnnnnnnnnnnnnnnnnnnnnnnnnnnnnnnnnnnnnnnnnnnnnnnnnnnnnnnnnnnnnnnnnnnnnnnnnnnnnnnnnnnnnnnnnnnnnnnnnnnnnnnnnnnnnnnnnnnnnnnnnnnnnnnnnnnnnnnnnnnnnnnnnnnnnnnnnnnnnnnnnnnnnnnnnnnnnnnnnnnnnnnnnnnnnnnnnnnnnnnnnnnnnnnnnnnnnnnnnnnnnnnnnnnnnnnnnnnnnnnnnnnnnnnnnnnnnnnnnnnnnnnnnnnnnnnnnnnnnnnnnnnnnnnnnnnnnnnnnnnnnnnnnnnnnnnnnnnnnnnnnnnnnnnnnnnnnnnnnnnnnnnnnnnnnnnnnnnnnnnnnnnnnnnnnnnnnnnnnnnnnnnnnnnnnnnnnnnnnnnnnnnnnnnnnnnnnnnnnnnnnnnnnnnnnnnnnnnnnnnnnnnnnnnnnnnnnnnnnnnnnnnnnnnnnnnnnnnnnnnnnnnnnnnnnnnnnnnnnnnnnnnnnnnnnnnnnnnnnnnnnnnnnnnnnnnnnnnnnnnnnnnnnnnnnnnnnnnnnnnnnnnnnnnnnnnnnnnnnnnnnnnnnnnnnnnnnnnnnnnnnnnnnnnnnnnnnnnnnnnnnnnnnnnnnnnnnnnnnnnnnnnnnnnnnnnnnnnnnnnnnnnnnnnnnnnnnnnnnnnnnnnnnnnnnnnnnnnnnnnnnnnnnnnnnnnnnnnnnnnnnnnnnnnnnnnnnnnnnnnnnnnnnnnnnnnnnnnnnnnnnnnnnnnnnnnnnnnnnnnnnnnnnnnnnnnnnnnnnnnnnnnnnnnnnnnnnnnnnnnnnnnnnnnnnnnnnnnnnnnnnnnnnnnnnnnnnnnnnnnnnnnnnnnnnnnnnnnnnnnnnnnnnnnnnnnnnnnnnnnnnnnnnnnnnnnnnnnnnnnnnnnnnnnnnnnnnnnnnnnnnnnnnnnnnnnnnnnnnnnnnnnnnnnnnnnnnnnnnnnnnnnnnnnnnnnnnnnnnnnnnnnnnnnnnnnnnnnnnnnnnnnnnnnnnnnnnnnnnnnnnnnnnnnnnnnnnnnnnnnnnnnnnnnnnnnnnnnnnnnnnnnnnnnnnnnnnnnnnnnnnnnnnnnnnnnnnnnnnnnnnnnnnnnnnnnnnnnnnnnnnnnnnnnnnnnnnnnnnnnnnnnnnnnnnnnnnnnnnnnnnnnnnnnnnnnnnnnnnnnnnnnnnnnnnnnnnnnnnnnnnnnnnnnnnnnnnnnnnnnnnnnnnnnnnnnnnnnnnnnnnnnnnnnnnnnnnnnnnnnnnnnnnnnnnnnnnnnnnnnnnnnnnnnnnnnnnnnnnnnnnnnnnnnnnnnnnnnnnnnnnnnnnnnnnnnnnnnnnnnnnnnnnnnnnnnnnnnnnnnnnnnnnnnnnnnnnnnnnnnnnnnnnnnnnnnnnnnnnnnnnnnnnnnnnnnnnnnnnnnnnnnnnnnnnnnnnnnnnnnnnnnnnnnnnnnnnnnnnnnnnnnnnnnnnnnnnnnnnnnnnnnnnnnnnnnnnnnnnnnnnnnnnnnnnnnnnnnnnnnnnnnnnnnnnnnnnnnnnnnnnnnnnnnnnnnnnnnnnnnnnnnnnnnnnnnnnnnnnnnnnnnnnnnnnnnnnnnnnnnnnnnnnnnnnnnnnnnnnnnnnnnnnnnnnnnnnnnnnnnnnnnnnnnnnnnnnnnnnnnnnnnnnnnnnnnnnnnnnnnnnnnnnnnnnnnnnnnnnnnnnnnnnnnnnnnnnnnnnnnnnnnnnnnnnnnnnnnnnnnnnnnnnnnnnnnnnnnnnnnnnnnnnnnnnnnnnnnnnnnnnnnnnnnnnnnnnnnnnnnnnnnnnnnnnnnnnnnnnnnnnnnnnnnnnnnnnnnnnnnnnnnnnnnnnnnnnnnnnnnnnnnnnnnnnnnnnnnnnnnnnnnnnnnnnnnnnnnnnnnnnnnnnnnnnnnnnnnnnnnnnnnnnnnnnnnnnnnnnnnnnnnnnnnnnnnnnnnnnnnnnnnnnnnnnnnnnnnnnnnnnnnnnnnnnnnnnnnnnnnnnnnnnnnnnnnnnnnnnnnnnnnnnnnnnnnnnnnnnnnnnnnnnnnnnnnnnnnnnnnnnnnnnnnnnnnnnnnnnnnnnnnnnnnnnnnnnnnnnnnnnnnnnnnnnnnnnnnnnnnnnnnnnnnnnnnnnnnnnnnnnnnnnnnnnnnnnnnnnnnnnnnnnnnnnnnnnnnnnnnnnnnnnnnnnnnnnnnnnnnnnnnnnnnnnnnnnnnnnnnnnnnnnnnnnnnnnnnnnnnnnnnnnnnnnnnnnnnnnnnnnnnnnnnnnnnnnnnnnnnnnnnnnnnnnnnnnnnnnnnnnnnnnnnnnnnnnnnnnnnnnnnnnnnnnnnnnnnnnnnnnnnnnnnnnnnnnnnnnnnnnnnnnnnnnnnnnnnnnnnnnnnnnnnnnnnnnnnnnnnnnnnnnnnnnnnnnnnnnnnnnnnnnnnnnnnnnnnnnnnnnnnnnnnnnnnnnnnnnnnnnnnnnnnnnnnnnnnnnnnnnnnnnnnnnnnnnnnnnnnnnnnnnnnnnnnnnnnnnnnnnnnnnnnnnnnnnnnnnnnnnnnnnnnnnnnnnnnnnnnnnnnnnnnnnnnnnnnnnnnnnnnnnnnnnnnnnnnnnnnnnnnnnnnnnnnnnnnnnnnnnnnnnnnnnnnnnnnnnnnnnnnnnnnnnnnnnnnnnnnnnnnnnnnnnnnnnnnnnnnnnnnnnnnnnnnnnnnnnnnnnnnnnnnnnnnnnnnnnnnnnnnnnnnnnnnnnnnnnnnnnnnnnnnnnnnnnnnnnnnnnnnnnnnnnnnnnnnnnnnnnnnnnnnnnnnnnnnnnnnnnnnnnnnnnnnnnnnnnnnnnnnnnnnnnnnnnnnnnnnnnnnnnnnnnnnnnnnnnnnnnnnnnnnnnnnnnnnnnnnnnnnnnnnnnnnnnnnnnnnnnnnnnnnnnnnnnnnnnnnnnnnnnnnnnnnnnnnnnnnnnnnnnnnnnnnnnnnnnnnnnnnnnnnnnnnnnnnnnnnnnnnnnnnnnnnnnnnnnnnnnnnnnnnnnnnnnnnnnnnnnnnnnnnnnnnnnnnnnnnnnnnnnnnnnnnnnnnnnnnnnnnnnnnnnnnnnnnnnnnnnnnnnnnnnnnnnnnnnnnnnnnnnnnnnnnnnnnnnnnnnnnnnnnnnnnnnnnnnnnnnnnnnnnnnnnnnnnnnnnnnnnnnnnnnnnnnnnnnnnnnnnnnnnnnnnnnnnnnnnnnnnnnnnnnnnnnnnnnnnnnnnnnnnnnnnnnnnnnnnnnnnnnnnnnnnnnnnnnnnnnnnnnnnnnnnnnnnnnnnnnnnnnnnnnnnnnnnnnnnnnnnnnnnnnnnnnnnnnnnnnnnnnnnnnnnnnnnnnnnnnnnnnnnnnnnnnnnnnnnnnnnnnnnnnnnnnnnnnnnnnnnnnnnnnnnnnnnnnnnnnnnnnnnnnnnnnnnnnnnnnnnnnnnnnnnnnnnnnnnnnnnnnnnnnnnnnnnnnnnnnnnnnnnnnnnnnnnnnnnnnnnnnnnnnnnnnnnnnnnnnnnnnnnnnnnnnnnnnnnnnnnnnnnnnnnnnnnnnnnnnnnnnnnnnnnnnnnnnnnnnnnnnnnnnnnnnnnnnnnnnnnnnnnnnnnnnnnnnnnnnnnnnnnnnnnnnnnnnnnnnnnnnnnnnnnnnnnnnnnnnnnnnnnnnnnnnnnnnnnnnnnnnnnnnnnnnnnnnnnnnnnnnnnnnnnnnnnnnnnnnnnnnnnnnnnnnnnnnnnnnnnnnnnnnnnnnnnnnnnnnnnnnnnnnnnnnnnnnnnnnnnnnnnnnnnnnnnnnnnnnnnnnnnnnnnnnnnnnnnnnnnnnnnnnnnnnnnnnnnnnnnnnnnnnnnnnnnnnnnnnnnnnnnnnnnnnnnnnnnnnnnnnnnnnnnnnnnnnnnnnnnnnnnnnnnnnnnnnnnnnnnnnnnnnnnnnnnnnnnnnnnnnnnnnnnnnnnnnnnnnnnnnnnnnnnnnnnnnnnnnnnnnnnnnnnnnnnnnnnnnnnnnnnnnnnnnnnnnnnnnnnnnnnnnnnnnnnnnnnnnnnnnnnnnnnnnnnnnnnnnnnnnnnnnnnnnnnnnnnnnnnnnnnnnnnnnnnnnnnnnnnnnnnnnnnnnnnnnnnnnnnnnnnnnnnnnnnnnnnnnnnnnnnnnnnnnnnnnnnnnnnnnnnnnnnnnnnnnnnnnnnnnnnnnnnnnnnnnnnnnnnnnnnnnnnnnnnnnnnnnnnnnnnnnnnnnnnnnnnnnnnnnnnnnnnnnnnnnnnnnnnnnnnnnnnnnnnnnnnnnnnnnnnnnnnnnnnnnnnnnnnnnnnnnnnnnnnnnnnnnnnnnnnnnnnnnnnnnnnnnnnnnnnnnnnnnnnnnnnnnnnnnnnnnnnnnnnnnnnnnnnnnnnnnnnnnnnnnnnnnnnnnnnnnnnnnnnnnnnnnnnnnnnnnnnnnnnnnnnnnnnnnnnnnnnnnnnnnnnnnnnnnnnnnnnnnnnnnnnnnnnnnnnnnnnnnnnnnnnnnnnnnnnnnnnnnnnnnnnnnnnnnnnnnnnnnnnnnnnnnnnnnnnnnnnnnnnnnnnnnnnnnnnnnnnnnnnnnnnnnnnnnnnnnnnnnnnnnnnnnnnnnnnnnnnnnnnnnnnnnnnnnnnnnnnnnnnnnnnnnnnnnnnnnnnnnnnnnnnnnnnnnnnnnnnnnnnnnnnnnnnnnnnnnnnnnnnnnnnnnnnnnnnnnnnnnnnnnnnnnnnnnnnnnnnnnnnnnnnnnnnnnnnnnnnnnnnnnnnnnnnnnnnnnnnnnnnnnnnnnnnnnnnnnnnnnnnnnnnnnnnnnnnnnnnnnnnnnnnnnnnnnnnnnnnnnnnnnnnnnnnnnnnnnnnnnnnnnnnnnnnnnnnnnnnnnnnnnnnnnnnnnnnnnnnnnnnnnnnnnnnnnnnnnnnnnnnnnnnnnnnnnnnnnnnnnnnnnnnnnnnnnnnnnnnnnnnnnnnnnnnnnnnnnnnnnnnnnnnnnnnnnnnnnnnnnnnnnnnnnnnnnnnnnnnnnnnnnnnnnnnnnnnnnnnnnnnnnnnnnnnnnnnnnnnnnnnnnnnnnnnnnnnnnnnnnnnnnnnnnnnnnnnnnnnnnnnnnnnnnnnnnnnnnnnnnnnnnnnnnnnnnnnnnnnnnnnnnnnnnnnnnnnnnnnnnnnnnnnnnnnnnnnnnnnnnnnnnnnnnnnnnnnnnnnnnnnnnnnnnnnnnnnnnnnnnnnnnnnnnnnnnnnnnnnnnnnnnnnnnnnnnnnnnnnnnnnnnnnnnnnnnnnnnnnnnnnnnnnnnnnnnnnnnnnnnnnnnnnnnnnnnnnnnnnnnnnnnnnnnnnnnnnnnnnnnnnnnnnnnnnnnnnnnnnnnnnnnnnnnnnnnnnnnnnnnnnnnnnnnnnnnnnnnnnnnnnnnnnnnnnnnnnnnnnnnnnnnnnnnnnnnnnnnnnnnnnnnnnnnnnnnnnnnnnnnnnnnnnnnnnnnnnnnnnnnnnnnnnnnnnnnnnnnnnnnnnnnnnnnnnnnnnnnnnnnnnnnnnnnnnnnnnnnnnnnnnnnnnnnnnnnnnnnnnnnnnnnnnnnnnnnnnnnnnnnnnnnnnnnnnnnnnnnnnnnnnnnnnnnnnnnnnnnnnnnnnnnnnnnnnnnnnnnnnnnnnnnnnnnnnnnnnnnnnnnnnnnnnnnnnnnnnnnnnnnnnnnnnnnnnnnnnnnnnnnnnnnnnnnnnnnnnnnnnnnnnnnnnnnnnnnnnnnnnnnnnnnnnnnnnnnnnnnnnnnnnnnnnnnnnnnnnnnnnnnnnnnnnnnnnnnnnnnnnnnnnnnnnnnnnnnnnnnnnnnnnnnnnnnnnnnnnnnnnnnnnnnnnnnnnnnnnnnnnnnnnnnnnnnnnnnnnnnnnnnnnnnnnnnnnnnnnnnnnnnnnnnnnnnnnnnnnnnnnnnnnnnnnnnnnnnnnnnnnnnnnnnnnnnnnnnnnnnnnnnnnnnnnnnnnnnnnnnnnnnnnnnnnnnnnnnnnnnnnnnnnnnnnnnnnnnnnnnnnnnnnnnnnnnnnnnnnnnnnnnnnnnnnnnnnnnnnnnnnnnnnnnnnnnnnnnnnnnnnnnnnnnnnnnnnnnnnnnnnnnnnnnnnnnnnnnnnnnnnnnnnnnnnnnnnnnnnnnnnnnnnnnnnnnnnnnnnnnnnnnnnnnnnnnnnnnnnnnnnnnnnnnnnnnnnnnnnnnnnnnnnnnnnnnnnnnnnnnnnnnnnnnnnnnnnnnnnnnnnnnnnnnnnnnnnnnnnnnnnnnnnnnnnnnnnnnnnnnnnnnnnnnnnnnnnnnnnnnnnnnnnnnnnnnnnnnnnnnnnnnnnnnnnnnnnnnnnnnnnnnnnnnnnnnnnnnnnnnnnnnnnnnnnnnnnnnnnnnnnnnnnnnnnnnnnnnnnnnnnnnnnnnnnnnnnnnnnnnnnnnnnnnnnnnnnnnnnnnnnnnnnnnnnnnnnnnnnnnnnnnnnnnnnnnnnnnnnnnnnnnnnnnnnnnnnnnnnnnnnnnnnnnnnnnnnnnnnnnnnnnnnnnnnnnnnnnnnnnnnnnnnnnnnnnnnnnnnnnnnnnnnnnnnnnnnnnnnnnnnnnnnnnnnnnnnnnnnnnnnnnnnnnnnnnnnnnnnnnnnnnnnnnnnnnnnnnnnnnnnnnnnnnnnnnnnnnnnnnnnnnnnnnnnnnnnnnnnnnnnnnnnnnnnnnnnnnnnnnnnnnnnnnnnnnnnnnnnnnnnnnnnnnnnnnnnnnnnnnnnnnnnnnnnnnnnnnnnnnnnnnnnnnnnnnnnnnnnnnnnnnnnnnnnnnnnnnnnnnnnnnnnnnnnnnnnnnnnnnnnnnnnnnnnnnnnnnnnnnnnnnnnnnnnnnnnnnnnnnnnnnnnnnnnnnnnnnnnnnnnnnnnnnnnnnnnnnnnnnnnnnnnnnnnnnnnnnnnnnnnnnnnnnnnnnnnnnnnnnnnnnnnnnnnnnnnnnnnnnnnnnnnnnnnnnnnnnnnnnnnnnnnnnnnnnnnnnnnnnnnnnnnnnnnnnnnnnnnnnnnnnnnnnnnnnnnnnnnnnnnnnnnnnnnnnnnnnnnnnnnnnnnnnnnnnnnnnnnnnnnnnnnnnnnnnnnnnnnnnnnnnnnnnnnnnnnnnnnnnnnnnnnnnnnnnnnnnnnnnnnnnnnnnnnnnnnnnnnnnnnnnnnnnnnnnnnnnnnnnnnnnnnnnnnnnnnnnnnnnnnnnnnnnnnnnnnnnnnnnnnnnnnnnnnnnnnnnnnnnnnnnnnnnnnnnnnnnnnnnnnnnnnnnnnnnnnnnnnnnnnnnnnnnnnnnnnnnnnnnnnnnnnnnnnnnnnnnnnnnnnnnnnnnnnnnnnnnnnnnnnnnnnnnnnnnnnnnnnnnnnnnnnnnnnnnnnnnnnnnnnnnnnnnnnnnnnnnnnnnnnnnnnnnnnnnnnnnnnnnnnnnnnnnnnnnnnnnnnnnnnnnnnnnnnnnnnnnnnnnnnnnnnnnnnnnnnnnnnnnnnnnnnnnnnnnnnnnnnnnnnnnnnnnnnnnnnnnnnnnnnnnnnnnnnnnnnnnnnnnnnnnnnnnnnnnnnnnnnnnnnnnnnnnnnnnnnnnnnnnnnnnnnnnnnnnnnnnnnnnnnnnnnnnnnnnnnnnnnnnnnnnnnnnnnnnnnnnnnnnnnnnnnnnnnnnnnnnnnnnnnnnnnnnnnnnnnnnnnnnnnnnnnnnnnnnnnnnnnnnnnnnnnnnnnnnnnnnnnnnnnnnnnnnnnnnnnnnnnnnnnnnnnnnnnnnnnnnnnnnnnnnnnnnnnnnnnnnnnnnnnnnnnnnnnnnnnnnnnnnnnnnnnnnnnnnnnnnnnnnnnnnnnnnnnnnnnnnnnnnnnnnnnnnnnnnnnnnnnnnnnnnnnnnnnnnnnnnnnnnnnnnnnnnnnnnnnnnnnnnnnnnnnnnnnnnnnnnnnnnnnnnnnnnnnnnnnnnnnnnnnnnnnnnnnnnnnnnnnnnnnnnnnnnnnnnnnnnnnnnnnnnnnnnnnnnnnnnnnnnnnnnnnnnnnnnnnnnnnnnnnnnnnnnnnnnnnnnnnnnnnnnnnnnnnnnnnnnnnnnnnnnnnnnnnnnnnnnnnnnnnnnnnnnnnnnnnnnnnnnnnnnnnnnnnnnnnnnnnnnnnnnnnnnnnnnnnnnnnnnnnnnnnnnnnnnnnnnnnnnnnnnnnnnnnnnnnnnnnnnnnnnnnnnnnnnnnnnnnnnnnnnnnnnnnnnnnnnnnnnnnnnnnnnnnnnnnnnnnnnnnnnnnnnnnnnnnnnnnnnnnnnnnnnnnnnnnnnnnnnnnnnnnnnnnnnnnnnnnnnnnnnnnnnnnnnnnnnnnnnnnnnnnnnnnnnnnnnnnnnnnnnnnnnnnnnnnnnnnnnnnnnnnnnnnnnnnnnnnnnnnnnnnnnnnnnnnnnnnnnnnnnnnnnnnnnnnnnnnnnnnnnnnnnnnnnnnnnnnnnnnnnnnnnnnnnnnnnnnnnnnnnnnnnnnnnnnnnnnnnnnnnnnnnnnnnnnnnnnnnnnnnnnnnnnnnnnnnnnnnnnnnnnnnnnnnnnnnnnnnnnnnnnnnnnnnnnnnnnnnnnnnnnnnnnnnnnnnnnnnnnnnnnnnnnnnnnnnnnnnnnnnnnnnnnnnnnnnnnnnnnnnnnnnnnnnnnnnnnnnnnnnnnnnnnnnnnnnnnnnnnnnnnnnnnnnnnnnnnnnnnnnnnnnnnnnnnnnnnnnnnnnnnnnnnnnnnnnnnnnnnnnnnnnnnnnnnnnnnnnnnnnnnnnnnnnnnnnnnnnnnnnnnnnnnnnnnnnnnnnnnnnnnnnnnnnnnnnnnnnnnnnnnnnnnnnnnnnnnnnnnnnnnnnnnnnnnnnnnnnnnnnnnnnnnnnnnnnnnnnnnnnnnnnnnnnnnnnnnnnnnnnnnnnnnnnnnnnnnnnnnnnnnnnnnnnnnnnnnnnnnnnnnnnnnnnnnnnnnnnnnnnnnnnnnnnnnnnnnnnnnnnnnnnnnnnnnnnnnnnnnnnnnnnnnnnnnnnnnnnnnnnnnnnnnnnnnnnnnnnnnnnnnnnnnnnnnnnnnnnnnnnnnnnnnnnnnnnnnnnnnnnnnnnnnnnnnnnnnnnnnnnnnnnnnnnnnnnnnnnnnnnnnnnnnnnnnnnnnnnnnnnnnnnnnnnnnnnnnnnnnnnnnnnnnnnnnnnnnnnnnnnnnnnnnnnnnnnnnnnnnnnnnnnnnnnnnnnnnnnnnnnnnnnnnnnnnnnnnnnnnnnnnnnnnnnnnnnnnnnnnnnnnnnnnnnnnnnnnnnnnnnnnnnnnnnnnnnnnnnnnnnnnnnnnnnnnnnnnnnnnnnnnnnnnnnnnnnnnnnnnnnnnnnnnnnnnnnnnnnnnnnnnnnnnnnnnnnnnnnnnnnnnnnnnnnnnnnnnnnnnnnnnnnnnnnnnnnnnnnnnnnnnnnnnnnnnnnnnnnnnnnnnnnnnnnnnnnnnnnnnnnnnnnnnnnnnnnnnnnnnnnnnnnnnnnnnnnnnnnnnnnnnnnnnnnnnnnnnnnnnnnnnnnnnnnnnnnnnnnnnnnnnnnnnnnnnnnnnnnnnnnnnnnnnnnnnnnnnnnnnnnnnnnnnnnnnnnnnnnnnnnnnnnnnnnnnnnnnnnnnnnnnnnnnnnnnnnnnnnnnnnnnnnnnnnnnnnnnnnnnnnnnnnnnnnnnnnnnnnnnnnnnnnnnnnnnnnnnnnnnnnnnnnnnnnnnnnnnnnnnnnnnnnnnnnnnnnnnnnnnnnnnnnnnnnnnnnnnnnnnnnnnnnnnnnnnnnnnnnnnnnnnnnnnnnnnnnnnnnnnnnnnnnnnnnnnnnnnnnnnnnnnnnnnnnnnnnnnnnnnnnnnnnnnnnnnnnnnnnnnnnnnnnnnnnnnnnnnnnnnnnnnnnnnnnnnnnnnnnnnnnnnnnnnnnnnnnnnnnnnnnnnnnnnnnnnnnnnnnnnnnnnnnnnnnnnnnnnnnnnnnnnnnnnnnnnnnnnnnnnnnnnnnnnnnnnnnnnnnnnnnnnnnnnnnnnnnnnnnnnnnnnnnnnnnnnnnnnnnnnnnnnnnnnnnnnnnnnnnnnnnnnnnnnnnnnnnnnnnnnnnnnnnnnnnnnnnnnnnnnnnnnnnnnnnnnnnnnnnnnnnnnnnnnnnnnnnnnnnnnnnnnnnnnnnnnnnnnnnnnnnnnnnnnnnnnnnnnnnnnnnnnnnnnnnnnnnnnnnnnnnnnnnnnnnnnnnnnnnnnnnnnnnnnnnnnnnnnnnnnnnnnnnnnnnnnnnnnnnnnnnnnnnnnnnnnnnnnnnnnnnnnnnnnnnnnnnnnnnnnnnnnnnnnnnnnnnnnnnnnnnnnnnnnnnnnnnnnnnnnnnnnnnnnnnnnnnnnnnnnnnnnnnnnnnnnnnnnnnnnnnnnnnnnnnnnnnnnnnnnnnnnnnnnnnnnnnnnnnnnnnnnnnnnnnnnnnnnnnnnnnnnnnnnnnnnnnnnnnnnnnnnnnnnnnnnnnnnnnnnnnnnnnnnnnnnnnnnnnnnnnnnnnnnnnnnnnnnnnnnnnnnnnnnnnnnnnnnnnnnnnnnnnnnnnnnnnnnnnnnnnnnnnnnnnnnnnnnnnnnnnnnnnnnnnnnnnnnnnnnnnnnnnnnnnnnnnnnnnnnnnnnnnnnnnnnnnnnnnnnnnnnnnnnnnnnnnnnnnnnnnnnnnnnnnnnnnnnnnnnnnnnnnnnnnnnnnnnnnnnnnnnnnnnnnnnnnnnnnnnnnnnnnnnnnnnnnnnnnnnnnnnnnnnnnnnnnnnnnnnnnnnnnnnnnnnnnnnnnnnnnnnnnnnnnnnnnnnnnnnnnnnnnnnnnnnnnnnnnnnnnnnnnnnnnnnnnnnnnnnnnnnnnnnnnnnnnnnnnnnnnnnnnnnnnnnnnnnnnnnnnnnnnnnnnnnnnnnnnnnnnnnnnnnnnnnnnnnnnnnnnnnnnnnnnnnnnnnnnnnnnnnnnnnnnnnnnnnnnnnnnnnnnnnnnnnnnnnnnnnnnnnnnnnnnnnnnnnnnnnnnnnnnnnnnnnnnnnnnnnnnnnnnnnnnnnnnnnnnnnnnnnnnnnnnnnnnnnnnnnnnnnnnnnnnnnnnnnnnnnnnnnnnnnnnnnnnnnnnnnnnnnnnnnnnnnnnnnnnnnnnnnnnnnnnnnnnnnnnnnnnnnnnnnnnnnnnnnnnnnnnnnnnnnnnnnnnnnnnnnnnnnnnnnnnnnnnnnnnnnnnnnnnnnnnnnnnnnnnnnnnnnnnnnnnnnnnnnnnnnnnnnnnnnnnnnnnnnnnnnnnnnnnnnnnnnnnnnnnnnnnnnnnnnnnnnnnnnnnnnnnnnnnnnnnnnnnnnnnnnnnnnnnnnnnnnnnnnnnnnnnnnnnnnnnnnnnnnnnnnnnnnnnnnnnnnnnnnnnnnnnnnnnnnnnnnnnnnnnnnnnnnnnnnnnnnnnnnnnnnnnnnnnnnnnnnnnnnnnnnnnnnnnnnnnnnnnnnnnnnnnnnnnnnnnnnnnnnnnnnnnnnnnnnnnnnnnnnnnnnnnnnnnnnnnnnnnnnnnnnnnnnnnnnnnnnnnnnnnnnnnnnnnnnnnnnnnnnnnnnnnnnnnnnnnnnnnnnnnnnnnnnnnnnnnnnnnnnnnnnnnnnnnnnnnnnnnnnnnnnnnnnnnnnnnnnnnnnnnnnnnnnnnnnnnnnnnnnnnnnnnnnnnnnnnnnnnnnnnnnnnnnnnnnnnnnnnnnnnnnnnnnnnnnnnnnnnnnnnnnnnnnnnnnnnnnnnnnnnnnnnnnnnnnnnnnnnnnnnnnnnnnnnnnnnnnnnnnnnnnnnnnnnnnnnnnnnnnnnnnnnnnnnnnnnnnnnnnnnnnnnnnnnnnnnnnnnnnnnnnnnnnnnnnnnnnnnnnnnnnnnnnnnnnnnnnnnnnnnnnnnnnnnnnnnnnnnnnnnnnnnnnnnnnnnnnnnnnnnnnnnnnnnnnnnnnnnnnnnnnnnnnnnnnnnnnnnnnnnnnnnnnnnnnnnnnnnnnnnnnnnnnnnnnnnnnnnnnnnnnnnnnnnnnnnnnnnnnnnnnnnnnnnnnnnnnnnnnnnnnnnnnnnnnnnnnnnnnnnnnnnnnnnnnnnnnnnnnnnnnnnnnnnnnnnnnnnnnnnnnnnnnnnnnnnnnnnnnnnnnnnnnnnnnnnnnnnnnnnnnnnnnnnnnnnnnnnnnnnnnnnnnnnnnnnnnnnnnnnnnnnnnnnnnnnnnnnnnnnnnnnnnnnnnnnnnnnnnnnnnnnnnnnnnnnnnnnnnnnnnnnnnnnnnnnnnnnnnnnnnnnnnnnnnnnnnnnnnnnnnnnnnnnnnnnnnnnnnnnnnnnnnnnnnnnnnnnnnnnnnnnnnnnnnnnnnnnnnnnnnnnnnnnnnnnnnnnnnnnnnnnnnnnnnnnnnnnnnnnnnnnnnnnnnnnnnnnnnnnnnnnnnnnnnnnnnnnnnnnnnnnnnnnnnnnnnnnnnnnnnnnnnnnnnnnnnnnnnnnnnnnnnnnnnnnnnnnnnnnnnnnnnnnnnnnnnnnnnnnnnnnnnnnnnnnnnnnnnnnnnnnnnnnnnnnnnnnnnnnnnnnnnnnnnnnnnnnnnnnnnnnnnnnnnnnnnnnnnnnnnnnnnnnnnnnnnnnnnnnnnnnnnnnnnnnnnnnnnnnnnnnnnnnnnnnnnnnnnnnnnnnnnnnnnnnnnnnnnnnnnnnnnnnnnnnnnnnnnnnnnnnnnnnnnnnnnnnnnnnnnnnnnnnnnnnnnnnnnnnnnnnnnnnnnnnnnnnnnnnnnnnnnnnnnnnnnnnnnnnnnnnnnnnnnnnnnnnnnnnnnnnnnnnnnnnnnnnnnnnnnnnnnnnnnnnnnnnnnnnnnnnnnnnnnnnnnnnnnnnnnnnnnnnnnnnnnnnnnnnnnnnnnnnnnnnnnnnnnnnnnnnnnnnnnnnnnnnnnnnnnnnnnnnnnnnnnnnnnnnnnnnnnnnnnnnnnnnnnnnnnnnnnnnnnnnnnnnnnnnnnnnnnnnnnnnnnnnnnnnnnnnnnnnnnnnnnnnnnnnnnnnnnnnnnnnnnnnnnnnnnnnnnnnnnnnnnnnnnnnnnnnnnnnnnnnnnnnnnnnnnnnnnnnnnnnnnnnnnnnnnnnnnnnnnnnnnnnnnnnnnnnnnnnnnnnnnnnnnnnnnnnnnnnnnnnnnnnnnnnnnnnnnnnnnnnnnnnnnnnnnnnnnnnnnnnnnnnnnnnnnnnnnnnnnnnnnnnnnnnnnnnnnnnnnnnnnnnnnnnnnnnnnnnnnnnnnnnnnnnnnnnnnnnnnnnnnnnnnnnnnnnnnnnnnnnnnnnnnnnnnnnnnnnnnnnnnnnnnnnnnnnnnnnnnnnnnnnnnnnnnnnnnnnnnnnnnnnnnnnnnnnnnnnnnnnnnnnnnnnnnnnnnnnnnnnnnnnnnnnnnnnnnnnnnnnnnnnnnnnnnnnnnnnnnnnnnnnnnnnnnnnnnnnnnnnnnnnnnnnnnnnnnnnnnnnnnnnnnnnnnnnnnnnnnnnnnnnnnnnnnnnnnnnnnnnnnnnnnnnnnnnnnnnnnnnnnnnnnnnnnnnnnnnnnnnnnnnnnnnnnnnnnnnnnnnnnnnnnnnnnnnnnnnnnnnnnnnnnnnnnnnnnnnnnnnnnnnnnnnnnnnnnnnnnnnnnnnnnnnnnnnnnnnnnnnnnnnnnnnnnnnnnnnnnnnnnnnnnnnnnnnnnnnnnnnnnnnnnnnnnnnnnnnnnnnnnnnnnnnnnnnnnnnnnnnnnnnnnnnnnnnnnnnnnnnnnnnnnnnnnnnnnnnnnnnnnnnnnnnnnnnnnnnnnnnnnnnnnnnnnnnnnnnnnnnnnnnnnnnnnnnnnnnnnnnnnnnnnnnnnnnnnnnnnnnnnnnnnnnnnnnnnnnnnnnnnnnnnnnnnnnnnnnnnnnnnnnnnnnnnnnnnnnnnnnnnnnnnnnnnnnnnnnnnnnnnnnnnnnnnnnnnnnnnnnnnnnnnnnnnnnnnnnnnnnnnnnnnnnnnnnnnnnnnnnnnnnnnnnnnnnnnnnnnnnnnnnnnnnnnnnnnnnnnnnnnnnnnnnnnnnnnnnnnnnnnnnnnnnnnnnnnnnnnnnnnnnnnnnnnnnnnnnnnnnnnnnnnnnnnnnnnnnnnnnnnnnnnnnnnnnnnnnnnnnnnnnnnnnnnnnnnnnnnnnnnnnnnnnnnnnnnnnnnnnnnnnnnnnnnnnnnnnnnnnnnnnnnnnnnnnnnnnnnnnnnnnnnnnnnnnnnnnnnnnnnnnnnnnnnnnnnnnnnnnnnnnnnnnnnnnnnnnnnnnnnnnnnnnnnnnnnnnnnnnnnnnnnnnnnnnnnnnnnnnnnnnnnnnnnnnnnnnnnnnnnnnnnnnnnnnnnnnnnnnnnnnnnnnnnnnnnnnnnnnnnnnnnnnnnnnnnnnnnnnnnnnnnnnnnnnnnnnnnnnnnnnnnnnnnnnnnnnnnnnnnnnnnnnnnnnnnnnnnnnnnnnnnnnnnnnnnnnnnnnnnnnnnnnnnnnnnnnnnnnnnnnnnnnnnnnnnnnnnnnnnnnnnnnnnnnnnnnnnnnnnnnnnnnnnnnnnnnnnnnnnnnnnnnnnnnnnnnnnnnnnnnnnnnnnnnnnnnnnnnnnnnnnnnnnnnnnnnnnnnnnnnnnnnnnnnnnnnnnnnnnnnnnnnnnnnnnnnnnnnnnnnnnnnnnnnnnnnnnnnnnnnnnnnnnnnnnnnnnnnnnnnnnnnnnnnnnnnnnnnnnnnnnnnnnnnnnnnnnnnnnnnnnnnnnnnnnnnnnnnnnnnnnnnnnnnnnnnnnnnnnnnnnnnnnnnnnnnnnnnnnnnnnnnnnnnnnnnnnnnnnnnnnnnnnnnnnnnnnnnnnnnnnnnnnnnnnnnnnnnnnnnnnnnnnnnnnnnnnnnnnnnnnnnnnnnnnnnnnnnnnnnnnnnnnnnnnnnnnnnnnnnnnnnnnnnnnnnnnnnnnnnnnnnnnnnnnnnnnnnnnnnnnnnnnnnnnnnnnnnnnnnnnnnnnnnnnnnnnnnnnnnnnnnnnnnnnnnnnnnnnnnnnnnnnnnnnnnnnnnnnnnnnnnnnnnnnnnnnnnnnnnnnnnnnnnnnnnnnnnnnnnnnnnnnnnnnnnnnnnnnnnnnnnnnnnnnnnnnnnnnnnnnnnnnnnnnnnnnnnnnnnnnnnnnnnnnnnnnnnnnnnnnnnnnnnnnnnnnnnnnnnnnnnnnnnnnnnnnnnnnnnnnnnnnnnnnnnnnnnnnnnnnnnnnnnnnnnnnnnnnnnnnnnnnnnnnnnnnnnnnnnnnnnnnnnnnnnnnnnnnnnnnnnnnnnnnnnnnnnnnnnnnnnnnnnnnnnnnnnnnnnnnnnnnnnnnnnnnnnnnnnnnnnnnnnnnnnnnnnnnnnnnnnnnnnnnnnnnnnnnnnnnnnnnnnnnnnnnnnnnnnnnnnnnnnnnnnnnnnnnnnnnnnnnnnnnnnnnnnnnnnnnnnnnnnnnnnnnnnnnnnnnnnnnnnnnnnnnnnnnnnnnnnnnnnnnnnnnnnnnnnnnnnnnnnnnnnnnnnnnnnnnnnnnnnnnnnnnnnnnnnnnnnnnnnnnnnnnnnnnnnnnnnnnnnnnnnnnnnnnnnnnnnnnnnnnnnnnnnnnnnnnnnnnnnnnnnnnnnnnnnnnnnnnnnnnnnnnnnnnnnnnnnnnnnnnnnnnnnnnnnnnnnnnnnnnnnnnnnnnnnnnnnnnnnnnnnnnnnnnnnnnnnnnnnnnnnnnnnnnnnnnnnnnnnnnnnnnnnnnnnnnnnnnnnnnnnnnnnnnnnnnnnnnnnnnnnnnnnnnnnnnnnnnnnnnnnnnnnnnnnnnnnnnnnnnnnnnnnnnnnnnnnnnnnnnnnnnnnnnnnnnnnnnnnnnnnnnnnnnnnnnnnnnnnnnnnnnnnnnnnnnnnnnnnnnnnnnnnnnnnnnnnnnnnnnnnnnnnnnnnnnnnnnnnnnnnnnnnnnnnnnnnnnnnnnnnnnnnnnnnnnnnnnnnnnnnnnnnnnnnnnnnnnnnnnnnnnnnnnnnnnnnnnnnnnnnnnnnnnnnnnnnnnnnnnnnnnnnnnnnnnnnnnnnnnnnnnnnnnnnnnnnnnnnnnnnnnnnnnnnnnnnnnnnnnnnnnnnnnnnnnnnnnnnnnnnnnnnnnnnnnnnnnnnnnnnnnnnnnnnnnnnnnnnnnnnnnnnnnnnnnnnnnnnnnnnnnnnnnnnnnnnnnnnnnnnnnnnnnnnnnnnnnnnnnnnnnnnnnnnnnnnnnnnnnnnnnnnnnnnnnnnnnnnnnnnnnnnnnnnnnnnnnnnnnnnnnnnnnnnnnnnnnnnnnnnnnnnnnnnnnnnnnnnnnnnnnnnnnnnnnnnnnnnnnnnnnnnnnnnnnnnnnnnnnnnnnnnnnnnnnnnnnnnnnnnnnnnnnnnnnnnnnnnnnnnnnnnnnnnnnnnnnnnnnnnnnnnnnnnnnnnnnnnnnnnnnnnnnnnnnnnnnnnnnnnnnnnnnnnnnnnnnnnnnnnnnnnnnnnnnnnnnnnnnnnnnnnnnnnnnnnnnnnnnnnnnnnnnnnnnnnnnnnnnnnnnnnnnnnnnnnnnnnnnnnnnnnnnnnnnnnnnnnnnnnnnnnnnnnnnnnnnnnnnnnnnnnnnnnnnnnnnnnnnnnnnnnnnnnnnnnnnnnnnnnnnnnnnnnnnnnnnnnnnnnnnnnnnnnnnnnnnnnnnnnnnnnnnnnnnnnnnnnnnnnnnnnnnnnnnnnnnnnnnnnnnnnnnnnnnnnnnnnnnnnnnnnnnnnnnnnnnnnnnnnnnnnnnnnnnnnnnnnnnnnnnnnnnnnnnnnnnnnnnnnnnnnnnnnnnnnnnnnnnnnnnnnnnnnnnnnnnnnnnnnnnnnnnnnnnnnnnnnnnnnnnnnnnnnnnnnnnnnnnnnnnnnnnnnnnnnnnnnnnnnnnnnnnnnnnnnnnnnnnnnnnnnnnnnnnnnnnnnnnnnnnnnnnnnnnnnnnnnnnnnnnnnnnnnnnnnnnnnnnnnnnnnnnnnnnnnnnnnnnnnnnnnnnnnnnnnnnnnnnnnnnnnnnnnnnnnnnnnnnnnnnnnnnnnnnnnnnnnnnnnnnnnnnnnnnnnnnnnnnnnnnnnnnnnnnnnnnnnnnnnnnnnnnnnnnnnnnnnnnnnnnnnnnnnnnnnnnnnnnnnnnnnnnnnnnnnnnnnnnnnnnnnnnnnnnnnnnnnnnnnnnnnnnnnnnnnnnnnnnnnnnnnnnnnnnnnnnnnnnnnnnnnnnnnnnnnnnnnnnnnnnnnnnnnnnnnnnnnnnnnnnnnnnnnnnnnnnnnnnnnnnnnnnnnnnnnnnnnnnnnnnnnnnnnnnnnnnnnnnnnnnnnnnnnnnnnnnnnnnnnnnnnnnnnnnnnnnnnnnnnnnnnnnnnnnnnnnnnnnnnnnnnnnnnnnnnnnnnnnnnnnnnnnnnnnnnnnnnnnnnnnnnnnnnnnnnnnnnnnnnnnnnnnnnnnnnnnnnnnnnnnnnnnnnnnnnnnnnnnnnnnnnnnnnnnnnnnnnnnnnnnnnnnnnnnnnnnnnnnnnnnnnnnnnnnnnnnnnnnnnnnnnnnnnnnnnnnnnnnnnnnnnnnnnnnnnnnnnnnnnnnnnnnnnnnnnnnnnnnnnnnnnnnnnnnnnnnnnnnnnnnnnnnnnnnnnnnnnnnnnnnnnnnnnnnnnnnnnnnnnnnnnnnnnnnnnnnnnnnnnnnnnnnnnnnnnnnnnnnnnnnnnnnnnnnnnnnnnnnnnnnnnnnnnnnnnnnnnnnnnnnnnnnnnnnnnnnnnnnnnnnnnnnnnnnnnnnnnnnnnnnnnnnnnnnnnnnnnnnnnnnnnnnnnnnnnnnnnnnnnnnnnnnnnnnnnnnnnnnnnnnnnnnnnnnnnnnnnnnnnnnnnnnnnnnnnnnnnnnnnnnnnnnnnnnnnnnnnnnnnnnnnnnnnnnnnnnnnnnnnnnnnnnnnnnnnnnnnnnnnnnnnnnnnnnnnnnnnnnnnnnnnnnnnnnnnnnnnnnnnnnnnnnnnnnnnnnnnnnnnnnnnnnnnnnnnnnnnnnnnnnnnnnnnnnnnnnnnnnnnnnnnnnnnnnnnnnnnnnnnnnnnnnnnnnnnnnnnnnnnnnnnnnnnnnnnnnnnnnnnnnnnnnnnnnnnnnnnnnnnnnnnnnnnnnnnnnnnnnnnnnnnnnnnnnnnnnnnnnnnnnnnnnnnnnnnnnnnnnnnnnnnnnnnnnnnnnnnnnnnnnnnnnnnnnnnnnnnnnnnnnnnnnnnnnnnnnnnnnnnnnnnnnnnnnnnnnnnnnnnnnnnnnnnnnnnnnnnnnnnnnnnnnnnnnnnnnnnnnnnnnnnnnnnnnnnnnnnnnnnnnnnnnnnnnnnnnnnnnnnnnnnnnnnnnnnnnnnnnnnnnnnnnnnnnnnnnnnnnnnnnnnnnnnnnnnnnnnnnnnnnnnnnnnnnnnnnnnnnnnnnnnnnnnnnnnnnnnnnnnnnnnnnnnnnnnnnnnnnnnnnnnnnnnnnnnnnnnnnnnnnnnnnnnnnnnnnnnnnnnnnnnnnnnnnnnnnnnnnnnnnnnnnnnnnnnnnnnnnnnnnnnnnnnnnnnnnnnnnnnnnnnnnnnnnnnnnnnnnnnnnnnnnnnnnnnnnnnnnnnnnnnnnnnnnnnnnnnnnnnnnnnnnnnnnnnnnnnnnnnnnnnnnnnnnnnnnnnnnnnnnnnnnnnnnnnnnnnnnnnnnnnnnnnnnnnnnnnnnnnnnnnnnnnnnnnnnnnnnnnnnnnnnnnnnnnnnnnnnnnnnnnnnnnnnnnnnnnnnnnnnnnnnnnnnnnnnnnnnnnnnnnnnnnnnnnnnnnnnnnnnnnnnnnnnnnnnnnnnnnnnnnnnnnnnnnnnnnnnnnnnnnnnnnnnnnnnnnnnnnnnnnnnnnnnnnnnnnnnnnnnnnnnnnnnnnnnnnnnnnnnnnnnnnnnnnnnnnnnnnnnnnnnnnnnnnnnnnnnnnnnnnnnnnnnnnnnnnnnnnnnnnnnnnnnnnnnnnnnnnnnnnnnnnnnnnnnnnnnnnnnnnnnnnnnnnnnnnnnnnnnnnnnnnnnnnnnnnnnnnnnnnnnnnnnnnnnnnnnnnnnnnnnnnnnnnnnnnnnnnnnnnnnnnnnnnnnnnnnnnnnnnnnnnnnnnnnnnnnnnnnnnnnnnnnnnnnnnnnnnnnnnnnnnnnnnnnnnnnnnnnnnnnnnnnnnnnnnnnnnnnnnnnnnnnnnnnnnnnnnnnnnnnnnnnnnnnnnnnnnnnnnnnnnnnnnnnnnnnnnnnnnnnnnnnnnnnnnnnnnnnnnnnnnnnnnnnnnnnnnnnnnnnnnnnnnnnnnnnnnnnnnnnnnnnnnnnnnnnnnnnnnnnnnnnnnnnnnnnnnnnnnnnnnnnnnnnnnnnnnnnnnnnnnnnnnnnnnnnnnnnnnnnnnnnnnnnnnnnnnnnnnnnnnnnnnnnnnnnnnnnnnnnnnnnnnnnnnnnnnnnnnnnnnnnnnnnnnnnnnnnnnnnnnnnnnnnnnnnnnnnnnnnnnnnnnnnnnnnnnnnnnnnnnnnnnnnnnnnnnnnnnnnnnnnnnnnnnnnnnnnnnnnnnnnnnnnnnnnnnnnnnnnnnnnnnnnnnnnnnnnnnnnnnnnnnnnnnnnnnnnnnnnnnnnnnnnnnnnnnnnnnnnnnnnnnnnnnnnnnnnnnnnnnnnnnnnnnnnnnnnnnnnnnnnnnnnnnnnnnnnnnnnnnnnnnnnnnnnnnnnnnnnnnnnnnnnnnnnnnnnnnnnnnnnnnnnnnnnnnnnnnnnnnnnnnnnnnnnnnnnnnnnnnnnnnnnnnnnnnnnnnnnnnnnnnnnnnnnnnnnnnnnnnnnnnnnnnnnnnnnnnnnnnnnnnnnnnnnnnnnnnnnnnnnnnnnnnnnnnnnnnnnnnnnnnnnnnnnnnnnnnnnnnnnnnnnnnnnnnnnnnnnnnnnnnnnnnnnnnnnnnnnnnnnnnnnnnnnnnnnnnnnnnnnnnnnnnnnnnnnnnnnnnnnnnnnnnnnnnnnnnnnnnnnnnnnnnnnnnnnnnnnnnnnnnnnnnnnnnnnnnnnnnnnnnnnnnnnnnnnnnnnnnnnnnnnnnnnnnnnnnnnnnnnnnnnnnnnnnnnnnnnnnnnnnnnnnnnnnnnnnnnnnnnnnnnnnnnnnnnnnnnnnnnnnnnnnnnnnnnnnnnnnnnnnnnnnnnnnnnnnnnnnnnnnnnnnnnnnnnnnnnnnnnnnnnnnnnnnnnnnnnnnnnnnnnnnnnnnnnnnnnnnnnnnnnnnnnnnnnnnnnnnnnnnnnnnnnnnnnnnnnnnnnnnnnnnnnnnnnnnnnnnnnnnnnnnnnnnnnnnnnnnnnnnnnnnnnnnnnnnnnnnnnnnnnnnnnnnnnnnnnnnnnnnnnnnnnnnnnnnnnnnnnnnnnnnnnnnnnnnnnnnnnnnnnnnnnnnnnnnnnnnnnnnnnnnnnnnnnnnnnnnnnnnnnnnnnnnnnnnnnnnnnnnnnnnnnnnnnnnnnnnnnnnnnnnnnnnnnnnnnnnnnnnnnnnnnnnnnnnnnnnnnnnnnnnnnnnnnnnnnnnnnnnnnnnnnnnnnnnnnnnnnnnnnnnnnnnnnnnnnnnnnnnnnnnnnnnnnnnnnnnnnnnnnnnnnnnnnnnnnnnnnnnnnnnnnnnnnnnnnnnnnnnnnnnnnnnnnnnnnnnnnnnnnnnnnnnnnnnnnnnnnnnnnnnnnnnnnnnnnnnnnnnnnnnnnnnnnnnnnnnnnnnnnnnnnnnnnnnnnnnnnnnnnnnnnnnnnnnnnnnnnnnnnnnnnnnnnnnnnnnnnnnnnnnnnnnnnnnnnnnnnnnnnnnnnnnnnnnnnnnnnnnnnnnnnnnnnnnnnnnnnnnnnnnnnnnnnnnnnnnnnnnnnnnnnnnnnnnnnnnnnnnnnnnnnnnnnnnnnnnnnnnnnnnnnnnnnnnnnnnnnnnnnnnnnnnnnnnnnnnnnnnnnnnnnnnnnnnnnnnnnnnnnnnnnnnnnnnnnnnnnnnnnnnnnnnnnnnnnnnnnnnnnnnnnnnnnnnnnnnnnnnnnnnnnnnnnnnnnnnnnnnnnnnnnnnnnnnnnnnnnnnnnnnnnnnnnnnnnnnnnnnnnnnnnnnnnnnnnnnnnnnnnnnnnnnnnnnnnnnnnnnnnnnnnnnnnnnnnnnnnnnnnnnnnnnnnnnnnnnnnnnnnnnnnnnnnnnnnnnnnnnnnnnnnnnnnnnnnnnnnnnnnnnnnnnnnnnnnnnnnnnnnnnnnnnnnnnnnnnnnnnnnnnnnnnnnnnnnnnnnnnnnnnnnnnnnnnnnnnnnnnnnnnnnnnnnnnnnnnnnnnnnnnnnnnnnnnnnnnnnnnnnnnnnnnnnnnnnnnnnnnnnnnnnnnnnnnnnnnnnnnnnnnnnnnnnnnnnnnnnnnnnnnnnnnnnnnnnnnnnnnnnnnnnnnnnnnnnnnnnnnnnnnnnnnnnnnnnnnnnnnnnnnnnnnnnnnnnnnnnnnnnnnnnnnnnnnnnnnnnnnnnnnnnnnnnnnnnnnnnnnnnnnnnnnnnnnnnnnnnnnnnnnnnnnnnnnnnnnnnnnnnnnnnnnnnnnnnnnnnnnnnnnnnnnnnnnnnnnnnnnnnnnnnnnnnnnnnnnnnnnnnnnnnnnnnnnnnnnnnnnnnnnnnnnnnnnnnnnnnnnnnnnnnnnnnnnnnnnnnnnnnnnnnnnnnnnnnnnnnnnnnnnnnnnnnnnnnnnnnnnnnnnnnnnnnnnnnnnnnnnnnnnnnnnnnnnnnnnnnnnnnnnnnnnnnnnnnnnnnnnnnnnnnnnnnnnnnnnnnnnnnnnnnnnnnnnnnnnnnnnnnnnnnnnnnnnnnnnnnnnnnnnnnnnnnnnnnnnnnnnnnnnnnnnnnnnnnnnnnnnnnnnnnnnnnnnnnnnnnnnnnnnnnnnnnnnnnnnnnnnnnnnnnnnnnnnnnnnnnnnnnnnnnnnnnnnnnnnnnnnnnnnnnnnnnnnnnnnnnnnnnnnnnnnnnnnnnnnnnnnnnnnnnnnnnnnnnnnnnnnnnnnnnnnnnnnnnnnnnnnnnnnnnnnnnnnnnnnnnnnnnnnnnnnnnnnnnnnnnnnnnnnnnnnnnnnnnnnnnnnnnnnnnnnnnnnnnnnnnnnnnnnnnnnnnnnnnnnnnnnnnnnnnnnnnnnnnnnnnnnnnnnnnnnnnnnnnnnnnnnnnnnnnnnnnnnnnnnnnnnnnnnnnnnnnnnnnnnnnnnnnnnnnnnnnnnnnnnnnnnnnnnnnnnnnnnnnnnnnnnnnnnnnnnnnnnnnnnnnnnnnnnnnnnnnnnnnnnnnnnnnnnnnnnnnnnnnnnnnnnnnnnnnnnnnnnnnnnnnnnnnnnnnnnnnnnnnnnnnnnnnnnnnnnnnnnnnnnnnnnnnnnnnnnnnnnnnnnnnnnnnnnnnnnnnnnnnnnnnnnnnnnnnnnnnnnnnnnnnnnnnnnnnnnnnnnnnnnnnnnnnnnnnnnnnnnnnnnnnnnnnnnnnnnnnnnnnnnnnnnnnnnnnnnnnnnnnnnnnnnnnnnnnnnnnnnnnnnnnnnnnnnnnnnnnnnnnnnnnnnnnnnnnnnnnnnnnnnnnnnnnnnnnnnnnnnnnnnnnnnnnnnnnnnnnnnnnnnnnnnnnnnnnnnnnnnnnnnnnnnnnnnnnnnnnnnnnnnnnnnnnnnnnnnnnnnnnnnnnnnnnnnnnnnnnnnnnnnnnnnnnnnnnnnnnnnnnnnnnnnnnnnnnnnnnnnnnnnnnnnnnnnnnnnnnnnnnnnnnnnnnnnnnnnnnnnnnnnnnnnnnnnnnnnnnnnnnnnnnnnnnnnnnnnnnnnnnnnnnnnnnnnnnnnnnnnnnnnnnnnnnnnnnnnnnnnnnnnnnnnnnnnnnnnnnnnnnnnnnnnnnnnnnnnnnnnnnnnnnnnnnnnnnnnnnnnnnnnnnnnnnnnnnnnnnnnnnnnnnnnnnnnnnnnnnnnnnnnnnnnnnnnnnnnnnnnnnnnnnnnnnnnnnnnnnnnnnnnnnnnnnnnnnnnnnnnnnnnnnnnnnnnnnnnnnnnnnnnnnnnnnnnnnnnnnnnnnnnnnnnnnnnnnnnnnnnnnnnnnnnnnnnnnnnnnnnnnnnnnnnnnnnnnnnnnnnnnnnnnnnnnnnnnnnnnnnnnnnnnnnnnnnnnnnnnnnnnnnnnnnnnnnnnnnnnnnnnnnnnnnnnnnnnnnnnnnnnnnnnnnnnnnnnnnnnnnnnnnnnnnnnnnnnnnnnnnnnnnnnnnnnnnnnnnnnnnnnnnnnnnnnnnnnnnnnnnnnnnnnnnnnnnnnnnnnnnnnnnnnnnnnnnnnnnnnnnnnnnnnnnnnnnnnnnnnnnnnnnnnnnnnnnnnnnnnnnnnnnnnnnnnnnnnnnnnnnnnnnnnnnnnnnnnnnnnnnnnnnnnnnnnnnnnnnnnnnnnnnnnnnnnnnnnnnnnnnnnnnnnnnnnnnnnnnnnnnnnnnnnnnnnnnnnnnnnnnnnnnnnnnnnnnnnnnnnnnnnnnnnnnnnnnnnnnnnnnnnnnnnnnnnnnnnnnnnnnnnnnnnnnnnnnnnnnnnnnnnnnnnnnnnnnnnnnnnnnnnnnnnnnnnnnnnnnnnnnnnnnnnnnnnnnnnnnnnnnnnnnnnnnnnnnnnnnnnnnnnnnnnnnnnnnnnnnnnnnnnnnnnnnnnnnnnnnnnnnnnnnnnnnnnnnnnnnnnnnnnnnnnnnnnnnnnnnnnnnnnnnnnnnnnnnnnnnnnnnnnnnnnnnnnnnnnnnnnnnnnnnnnnnnnnnnnnnnnnnnnnnnnnnnnnnnnnnnnnnnnnnnnnnnnnnnnnnnnnnnnnnnnnnnnnnnnnnnnnnnnnnnnnnnnnnnnnnnnnnnnnnnnnnnnnnnnnnnnnnnnnnnnnnnnnnnnnnnnnnnnnnnnnnnnnnnnnnnnnnnnnnnnnnnnnnnnnnnnnnnnnnnnnnnnnnnnnnnnnnnnnnnnnnnnnnnnnnnnnnnnnnnnnnnnnnnnnnnnnnnnnnnnnnnnnnnnnnnnnnnnnnnnnnnnnnnnnnnnnnnnnnnnnnnnnnnnnnnnnnnnnnnnnnnnnnnnnnnnnnnnnnnnnnnnnnnnnnnnnnnnnnnnnnnnnnnnnnnnnnnnnnnnnnnnnnnnnnnnnnnnnnnnnnnnnnnnnnnnnnnnnnnnnnnnnnnnnnnnnnnnnnnnnnnnnnnnnnnnnnnnnnnnnnnnnnnnnnnnnnnnnnnnnnnnnnnnnnnnnnnnnnnnnnnnnnnnnnnnnnnnnnnnnnnnnnnnnnnnnnnnnnnnnnnnnnnnnnnnnnnnnnnnnnnnnnnnnnnnnnnnnnnnnnnnnnnnnnnnnnnnnnnnnnnnnnnnnnnnnnnnnnnnnnnnnnnnnnnnnnnnnnnnnnnnnnnnnnnnnnnnnnnnnnnnnnnnnnnnnnnnnnnnnnnnnnnnnnnnnnnnnnnnnnnnnnnnnnnnnnnnnnnnnnnnnnnnnnnnnnnnnnnnnnnnnnnnnnnnnnnnnnnnnnnnnnnnnnnnnnnnnnnnnnnnnnnnnnnnnnnnnnnnnnnnnnnnnnnnnnnnnnnnnnnnnnnnnnnnnnnnnnnnnnnnnnnnnnnnnnnnnnnnnnnnnnnnnnnnnnnnnnnnnnnnnnnnnnnnnnnnnnnnnnnnnnnnnnnnnnnnnnnnnnnnnnnnnnnnnnnnnnnnnnnnnnnnnnnnnnnnnnnnnnnnnnnnnnnnnnnnnnnnnnnnnnnnnnnnnnnnnnnnnnnnnnnnnnnnnnnnnnnnnnnnnnnnnnnnnnnnnnnnnnnnnnnnnnnnnnnnnnnnnnnnnnnnnnnnnnnnnnnnnnnnnnnnnnnnnnnnnnnnnnnnnnnnnnnnnnnnnnnnnnnnnnnnnnnnnnnnnnnnnnnnnnnnnnnnnnnnnnnnnnnnnnnnnnnnnnnnnnnnnnnnnnnnnnnnnnnnnnnnnnnnnnnnnnnnnnnnnnnnnnnnnnnnnnnnnnnnnnnnnnnnnnnnnnnnnnnnnnnnnnnnnnnnnnnnnnnnnnnnnnnnnnnnnnnnnnnnnnnnnnnnnnnnnnnnnnnnnnnnnnnnnnnnnnnnnnnnnnnnnnnnnnnnnnnnnnnnnnnnnnnnnnnnnnnnnnnnnnnnnnnnnnnnnnnnnnnnnnnnnnnnnnnnnnnnnnnnnnnnnnnnnnnnnnnnnnnnnnnnnnnnnnnnnnnnnnnnnnnnnnnnnnnnnnnnnnnnnnnnnnnnnnnnnnnnnnnnnnnnnnnnnnnnnnnnnnnnnnnnnnnnnnnnnnnnnnnnnnnnnnnnnnnnnnnnnnnnnnnnnnnnnnnnnnnnnnnnnnnnnnnnnnnnnnnnnnnnnnnnnnnnnnnnnnnnnnnnnnnnnnnnnnnnnnnnnnnnnnnnnnnnnnnnnnnnnnnnnnnnnnnnnnnnnnnnnnnnnnnnnnnnnnnnnnnnnnnnnnnnnnnnnnnnnnnnnnnnnnnnnnnnnnnnnnnnnnnnnnnnnnnnnnnnnnnnnnnnnnnnnnnnnnnnnnnnnnnnnnnnnnnnnnnnnnnnnnnnnnnnnnnnnnnnnnnnnnnnnnnnnnnnnnnnnnnnnnnnnnnnnnnnnnnnnnnnnnnnnnnnnnnnnnnnnnnnnnnnnnnnnnnnnnnnnnnnnnnnnnnnnnnnnnnnnnnnnnnnnnnnnnnnnnnnnnnnnnnnnnnnnnnnnnnnnnnnnnnnnnnnnnnnnnnnnnnnnnnnnnnnnnnnnnnnnnnnnnnnnnnnnnnnnnnnnnnnnnnnnnnnnnnnnnnnnnnnnnnnnnnnnnnnnnnnnnnnnnnnnnnnnnnnnnnnnnnnnnnnnnnnnnnnnnnnnnnnnnnnnnnnnnnnnnnnnnnnnnnnnnnnnnnnnnnnnnnnnnnnnnnnnnnnnnnnnnnnnnnnnnnnnnnnnnnnnnnnnnnnnnnnnnnnnnnnnnnnnnnnnnnnnnnnnnnnnnnnnnnnnnnnnnnnnnnnnnnnnnnnnnnnnnnnnnnnnnnnnnnnnnnnnnnnnnnnnnnnnnnnnnnnnnnnnnnnnnnnnnnnnnnnnnnnnnnnnnnnnnnnnnnnnnnnnnnnnnnnnnnnnnnnnnnnnnnnnnnnnnnnnnnnnnnnnnnnnnnnnnnnnnnnnnnnnnnnnnnnnnnnnnnnnnnnnnnnnnnnnnnnnnnnnnnnnnnnnnnnnnnnnnnnnnnnnnnnnnnnnnnnnnnnnnnnnnnnnnnnnnnnnnnnnnnnnnnnnnnnnnnnnnnnnnnnnnnnnnnnnnnnnnnnnnnnnnnnnnnnnnnnnnnnnnnnnnnnnnnnnnnnnnnnnnnnnnnnnnnnnnnnnnnnnnnnnnnnnnnnnnnnnnnnnnnnnnnnnnnnnnnnnnnnnnnnnnnnnnnnnnnnnnnnnnnnnnnnnnnnnnnnnnnnnnnnnnnnnnnnnnnnnnnnnnnnnnnnnnnnnnnnnnnnnnnnnnnnnnnnnnnnnnnnnnnnnnnnnnnnnnnnnnnnnnnnnnnnnnnnnnnnnnnnnnnnnnnnnnnnnnnnnnnnnnnnnnnnnnnnnnnnnnnnnnnnnnnnnnnnnnnnnnnnnnnnnnnnnnnnnnnnnnnnnnnnnnnnnnnnnnnnnnnnnnnnnnnnnnnnnnnnnnnnnnnnnnnnnnnnnnnnnnnnnnnnnnnnnnnnnnnnnnnnnnnnnnnnnnnnnnnnnnnnnnnnnnnnnnnnnnnnnnnnnnnnnnnnnnnnnnnnnnnnnnnnnnnnnnnnnnnnnnnnnnnnnnnnnnnnnnnnnnnnnnnnnnnnnnnnnnnnnnnnnnnnnnnnnnnnnnnnnnnnnnnnnnnnnnnnnnnnnnnnnnnnnnnnnnnnnnnnnnnnnnnnnnnnnnnnnnnnnnnnnnnnnnnnnnnnnnnnnnnnnnnnnnnnnnnnnnnnnnnnnnnnnnnnnnnnnnnnnnnnnnnnnnnnnnnnnnnnnnnnnnnnnnnnnnnnnnnnnnnnnnnnnnnnnnnnnnnnnnnnnnnnnnnnnnnnnnnnnnnnnnnnnnnnnnnnnnnnnnnnnnnnnnnnnnnnnnnnnnnnnnnnnnnnnnnnnnnnnnnnnnnnnnnnnnnnnnnnnnnnnnnnnnnnnnnnnnnnnnnnnnnnnnnnnnnnnnnnnnnnnnnnnnnnnnnnnnnnnnnnnnnnnnnnnnnnnnnnnnnnnnnnnnnnnnnnnnnnnnnnnnnnnnnnnnnnnnnnnnnnnnnnnnnnnnnnnnnnnnnnnnnnnnnnnnnnnnnnnnnnnnnnnnnnnnnnnnnnnnnnnnnnnnnnnnnnnnnnnnnnnnnnnnnnnnnnnnnnnnnnnnnnnnnnnnnnnnnnnnnnnnnnnnnnnnnnnnnnnnnnnnnnnnnnnnnnnnnnnnnnnnnnnnnnnnnnnnnnnnnnnnnnnnnnnnnnnnnnnnnnnnnnnnnnnnnnnnnnnnnnnnnnnnnnnnnnnnnnnnnnnnnnnnnnnnnnnnnnnnnnnnnnnnnnnnnnnnnnnnnnnnnnnnnnnnnnnnnnnnnnnnnnnnnnnnnnnnnnnnnnnnnnnnnnnnnnnnnnnnnnnnnnnnnnnnnnnnnnnnnnnnnnnnnnnnnnnnnnnnnnnnnnnnnnnnnnnnnnnnnnnnnnnnnnnnnnnnnnnnnnnnnnnnnnnnnnnnnnnnnnnnnnnnnnnnnnnnnnnnnnnnnnnnnnnnnnnnnnnnnnnnnnnnnnnnnnnnnnnnnnnnnnnnnnnnnnnnnnnnnnnnnnnnnnnnnnnnnnnnnnnnnnnnnnnnnnnnnnnnnnnnnnnnnnnnnnnnnnnnnnnnnnnnnnnnnnnnnnnnnnnnnnnnnnnnnnnnnnnnnnnnnnnnnnnnnnnnnnnnnnnnnnnnnnnnnnnnnnnnnnnnnnnnnnnnnnnnnnnnnnnnnnnnnnnnnnnnnnnnnnnnnnnnnnnnnnnnnnnnnnnnnnnnnnnnnnnnnnnnnnnnnnnnnnnnnnnnnnnnnnnnnnnnnnnnnnnnnnnnnnnnnnnnnnnnnnnnnnnnnnnnnnnnnnnnnnnnnnnnnnnnnnnnnnnnnnnnnnnnnnnnnnnnnnnnnnnnnnnnnnnnnnnnnnnnnnnnnnnnnnnnnnnnnnnnnnnnnnnnnnnnnnnnnnnnnnnnnnnnnnnnnnnnnnnnnnnnnnnnnnnnnnnnnnnnnnnnnnnnnnnnnnnnnnnnnnnnnnnnnnnnnnnnnnnnnnnnnnnnnnnnnnnnnnnnnnnnnnnnnnnnnnnnnnnnnnnnnnnnnnnnnnnnnnnnnnnnnnnnnnnnnnnnnnnnnnnnnnnnnnnnnnnnnnnnnnnnnnnnnnnnnnnnnnnnnnnnnnnnnnnnnnnnnnnnnnnnnnnnnnnnnnnnnnnnnnnnnnnnnnnnnnnnnnnnnnnnnnnnnnnnnnnnnnnnnnnnnnnnnnnnnnnnnnnnnnnnnnnnnnnnnnnnnnnnnnnnnnnnnnnnnnnnnnnnnnnnnnnnnnnnnnnnnnnnnnnnnnnnnnnnnnnnnnnnnnnnnnnnnnnnnnnnnnnnnnnnnnnnnnnnnnnnnnnnnnnnnnnnnnnnnnnnnnnnnnnnnnnnnnnnnnnnnnnnnnnnnnnnnnnnnnnnnnnnnnnnnnnnnnnnnnnnnnnnnnnnnnnnnnnnnnnnnnnnnnnnnnnnnnnnnnnnnnnnnnnnnnnnnnnnnnnnnnnnnnnnnnnnnnnnnnnnnnnnnnnnnnnnnnnnnnnnnnnnnnnnnnnnnnnnnnnnnnnnnnnnnnnnnnnnnnnnnnnnnnnnnnnnnnnnnnnnnnnnnnnnnnnnnnnnnnnnnnnnnnnnnnnnnnnnnnnnnnnnnnnnnnnnnnnnnnnnnnnnnnnnnnnnnnnnnnnnnnnnnnnnnnnnnnnnnnnnnnnnnnnnnnnnnnnnnnnnnnnnnnnnnnnnnnnnnnnnnnnnnnnnnnnnnnnnnnnnnnnnnnnnnnnnnnnnnnnnnnnnnnnnnnnnnnnnnnnnnnnnnnnnnnnnnnnnnnnnnnnnnnnnnnnnnnnnnnnnnnnnnnnnnnnnnnnnnnnnnnnnnnnnnnnnnnnnnnnnnnnnnnnnnnnnnnnnnnnnnnnnnnnnnnnnnnnnnnnnnnnnnnnnnnnnnnnnnnnnnnnnnnnnnnnnnnnnnnnnnnnnnnnnnnnnnnnnnnnnnnnnnnnnnnnnnnnnnnnnnnnnnnnnnnnnnnnnnnnnnnnnnnnnnnnnnnnnnnnnnnnnnnnnnnnnnnnnnnnnnnnnnnnnnnnnnnnnnnnnnnnnnnnnnnnnnnnnnnnnnnnnnnnnnnnnnnnnnnnnnnnnnnnnnnnnnnnnnnnnnnnnnnnnnnnnnnnnnnnnnnnnnnnnnnnnnnnnnnnnnnnnnnnnnnnnnnnnnnnnnnnnnnnnnnnnnnnnnnnnnnnnnnnnnnnnnnnnnnnnnnnnnnnnnnnnnnnnnnnnnnnnnnnnnnnnnnnnnnnnnnnnnnnnnnnnnnnnnnnnnnnnnnnnnnnnnnnnnnnnnnnnnnnnnnnnnnnnnnnnnnnnnnnnnnnnnnnnnnnnnnnnnnnnnnnnnnnnnnnnnnnnnnnnnnnnnnnnnnnnnnnnnnnnnnnnnnnnnnnnnnnnnnnnnnnnnnnnnnnnnnnnnnnnnnnnnnnnnnnnnnnnnnnnnnnnnnnnnnnnnnnnnnnnnnnnnnnnnnnnnnnnnnnnnnnnnnnnnnnnnnnnnnnnnnnnnnnnnnnnnnnnnnnnnnnnnnnnnnnnnnnnnnnnnnnnnnnnnnnnnnnnnnnnnnnnnnnnnnnnnnnnnnnnnnnnnnnnnnnnnnnnnnnnnnnnnnnnnnnnnnnnnnnnnnnnnnnnnnnnnnnnnnnnnnnnnnnnnnnnnnnnnnnnnnnnnnnnnnnnnnnnnnnnnnnnnnnnnnnnnnnnnnnnnnnnnnnnnnnnnnnnnnnnnnnnnnnnnnnnnnnnnnnnnnnnnnnnnnnnnnnnnnnnnnnnnnnnnnnnnnnnnnnnnnnnnnnnnnnnnnnnnnnnnnnnnnnnnnnnnnnnnnnnnnnnnnnnnnnnnnnnnnnnnnnnnnnnnnnnnnnnnnnnnnnnnnnnnnnnnnnnnnnnnnnnnnnnnnnnnnnnnnnnnnnnnnnnnnnnnnnnnnnnnnnnnnnnnnnnnnnnnnnnnnnnnnnnnnnnnnnnnnnnnnnnnnnnnnnnnnnnnnnnnnnnnnnnnnnnnnnnnnnnnnnnnnnnnnnnnnnnnnnnnnnnnnnnnnnnnnnnnnnnnnnnnnnnnnnnnnnnnnnnnnnnnnnnnnnnnnnnnnnnnnnnnnnnnnnnnnnnnnnnnnnnnnnnnnnnnnnnnnnnnnnnnnnnnnnnnnnnnnnnnnnnnnnnnnnnnnnnnnnnnnnnnnnnnnnnnnnnnnnnnnnnnnnnnnnnnnnnnnnnnnnnnnnnnnnnnnnnnnnnnnnnnnnnnnnnnnnnnnnnnnnnnnnnnnnnnnnnnnnnnnnnnnnnnnnnnnnnnnnnnnnnnnnnnnnnnnnnnnnnnnnnnnnnnnnnnnnnnnnnnnnnnnnnnnnnnnnnnnnnnnnnnnnnnnnnnnnnnnnnnnnnnnnnnnnnnnnnnnnnnnnnnnnnnnnnnnnnnnnnnnnnnnnnnnnnnnnnnnnnnnnnnnnnnnnnnnnnnnnnnnnnnnnnnnnnnnnnnnnnnnnnnnnnnnnnnnnnnnnnnnnnnnnnnnnnnnnnnnnnnnnnnnnnnnnnnnnnnnnnnnnnnnnnnnnnnnnnnnnnnnnnnnnnnnnnnnnnnnnnnnnnnnnnnnnnnnnnnnnnnnnnnnnnnnnnnnnnnnnnnnnnnnnnnnnnnnnnnnnnnnnnnnnnnnnnnnnnnnnnnnnnnnnnnnnnnnnnnnnnnnnnnnnnnnnnnnnnnnnnnnnnnnnnnnnnnnnnnnnnnnnnnnnnnnnnnnnnnnnnnnnnnnnnnnnnnnnnnnnnnnnnnnnnnnnnnnnnnnnnnnnnnnnnnnnnnnnnnnnnnnnnnnnnnnnnnnnnnnnnnnnnnnnnnnnnnnnnnnnnnnnnnnnnnnnnnnnnnnnnnnnnnnnnnnnnnnnnnnnnnnnnnnnnnnnnnnnnnnnnnnnnnnnnnnnnnnnnnnnnnnnnnnnnnnnnnnnnnnnnnnnnnnnnnnnnnnnnnnnnnnnnnnnnnnnnnnnnnnnnnnnnnnnnnnnnnnnnnnnnnnnnnnnnnnnnnnnnnnnnnnnnnnnnnnnnnnnnnnnnnnnnnnnnnnnnnnnnnnnnnnnnnnnnnnnnnnnnnnnnnnnnnnnnnnnnnnnnnnnnnnnnnnnnnnnnnnnnnnnnnnnnnnnnnnnnnnnnnnnnnnnnnnnnnnnnnnnnnnnnnnnnnnnnnnnnnnnnnnnnnnnnnnnnnnnnnnnnnnnnnnnnnnnnnnnnnnnnnnnnnnnnnnnnnnnnnnnnnnnnnnnnnnnnnnnnnnnnnnnnnnnnnnnnnnnnnnnnnnnnnnnnnnnnnnnnnnnnnnnnnnnnnnnnnnnnnnnnnnnnnnnnnnnnnnnnnnnnnnnnnnnnnnnnnnnnnnnnnnnnnnnnnnnnnnnnnnnnnnnnnnnnnnnnnnnnnnnnnnnnnnnnnnnnnnnnnnnnnnnnnnnnnnnnnnnnnnnnnnnnnnnnnnnnnnnnnnnnnnnnnagtattctcagcaacttctttgtgacgtttgcattcatctcacagtgttgaacataccttttcatagagtagttttgaaacactatttttgtagaatctgcaagtggatatttggactgcgttgagaccttcattggaaatgggaatgtcttcacataaacactagacagaagcattctctgaaacttctttgtgatgtgtgtattcaactcacagagttgaaccttccttttttatggagcagttttgaaacactgtttttgtagaatctgcaagtggatatttggagcgatttgaggcctatggtagaaaaagaaatatcttcatataaatagtagacagaagtattctcagaaacatctttgtgatgtttgcattcaactcacagagttgatccttccttttaatagggcagttttgcaacactctttttgtagaatgcaccagtgggcttttggagcacgtcaagggctatggtgaaaaaggaaatatcttcacataaaaactagacagaagtattctgtaaaactcctttgtgatgtttgcattcagctcagaaagttgaacttctctttatatagtccagttttcaaacactatttttgtagaatctgcaagtggatactgggactgctttgaggccttcgttggaaacgggattatcttcacatagaaactagactgaaggattcttagaaacttctttgtgatgtgtgcattcaactcaccgagtggaacctcacttttgatagagcagagttgaaagacacttgttgtagaatctgcatgtggatatttggagtgctttgaagccttccttggaaacgggaatatcttcacataaaaactagacataaggattctcagaaacttccttgtgatctgtccattcaacacacagagttgaactttcctttttatggagccgttttgaaacactgtttttgtagaatctgaaagtggatatttggagcgctttgaggcttaaggtagaaaaagaaatatctgcatatcaaaactagacagaagcgttctcagaaacttctttgtgatgtttgcattcaactaccagagttgaaccttccttttgatagaggagttttgaaatgctctttttgtagaatctgcacgtggatacctggaacgatttttgagacctatgtctcaaaaggaaatatcttcctatgaaaaatagacaaaagcattctcagaaactactttgtgttatgtgcattcaactcacagagtacaaccttttttttgatagagtagttttgaaacactctgtagaatctgaaagtggatatttggagctctttgagggctatggtggaaaagaaaatatattcacattaaactagccagaagcattctcagaaacttctttatgatgtttgcattaaactcacagagttgaacatacctttccatagagcagttttgaaacactctttttgtggaatccgcaagcggatatttggaccgctttgagaccttcgctggaaatgggaatgtcttcacatataaactaaacagaagcattctcagaaacttcttcgtgatgtgtgcattctactcccaaagttgaaccttccttttcataaagcatttttgaaacactccttttgtacaatctacaattggatatttggaacgctttgatgcccgtggtagaaaaggaaatctcctcatataaaaactagacagaaggattcacagaaactgctttgtgacgtgtgcattcaaatcacggagttggacctttcttttgttagagcagttttgaaacactgtttctgtggaatctgccagcggacatttggagcgcattgagggctatggtggagaaggaaatatcttcacagaaaaactagaaagaagcattctcggaaacatctatgtgaagtgtgcattcaactcacagagttgaaccttccttttgatagaagagttttgaaacactcttttgtacaattgcaggtgaatatttggagcgctttgaagcctttgttggaaatgggaatatcctcacataaaaactagccagaagcattctcagaaacttctatgtgatgtgtgcattgaacccagagaggtgaaccgttcctttgagagagcagttttgaaacgtgtttttgtaagatctgcaagtggatattaggggcgctttgagtccttaggtggaaacgggaatatcttcgaataaaaactagacagaatgattctcagaatcttctttgtgatgtgggcattcaactaacacagttgaacatttcttttgacagagcagttctgaaacactctttttgtagaatccgccagtggatatttggagcgctttgagggctattgtgcaaatggaaatatcttcacctaaaaactagaccgaagcaatcccagaaactactttgtgatgtttgcattcaactcatagagttgaacctacctcttcatagagcagtttggaaaacctctttttgtagaatctgcaagtggatatttggaccactttgaggccttcataggaaacagtactatcttcacataaaaactaggtagaagcattgtcagaaaattctttgtgatgtgtgaattcaactcacagagttgaaccttcctttaatagagcagttttgaaacactctttttgtagaatctgcaagtagatatttggagcgctttgaggccttcgttggaaaccggaatatcttcacataaaaagtagatagaggcattctcagaaactttttttgtgatatgtagattcagttcacagcgttgaacctttcttttgatagagcagttttgaaaaactcttttatcgagtctgcaagtagacatttggagtgctttgagggctgtggtcgaaaaggaaatatcttcacatagaaactagactgaatcattctcagcaacttcttggtgacgtttgcattcatctcacagtgttgaacatacctttgcatagagtagttttgaaacactatttttgtagaatctgcaagtggacatttggactgctttgaggccttcatcggaaacgggaatatcttcacataaacactagacagaagcattctctgaaacttctttgtgatgtgtgtattcaactcacagagttgaaccatcttttttatggagcggttttgaaacagtgttttttgtagaatcagcaattggatattgggagcgctttgaggcctctggtgtaaagggaatgtcttcacataaaaactggacagaagcattctcagaaacatctttgtgatgtttgcattcaactcacagagttgatccttccttttaatagggcagttttgcaacactctttttgtagaatgcaccagcgggcttttggagcacgtcaagggctatggtgaaaaaggaaatatcttcacaaaaaaccagacagaagtattctgtaaaactcctttgtgatgtttgcattcaactcagaaagttgaacttctctttatatagtccagttttcaaacactatttttgtagaatctgcaagtggatagtgggactgctttgaggccttcattggaaacgggattatcttcacataaaaactagacataaggattcttagaaacttctttgtgatgtgtgcattcaactcaccgagtggaacctcacttttgatagagcagtgttgaaagacacttgttgtagaatctgcaggtggatatttggagtgctttgaagccttccttggaaacgggaatatcttcacataaaaactagacataagcattctcagaaactcctttgtgatctgtccattcagctcacagagttgaaccttccttttgatagagcagttttgaaacactctttctgtagagtgtgcaagtggatatcaggagcgctttgtcgcctatggcagaaaaagaaatatctggctctaaaaactagacagaagcgttctcagaaacttctttgtgatgtttgcattcaactaccagagttgaaccttccttttgatagagcagttttgaaacgctctttttgtagaatctgcacgtggatatctggagcgatttttgaggcctacgttcaaaaaggaaatatcttcctatgaaaaacagacaaaagcattctcagaaactacttagagatatgtgcattcaactcacagagttgaaacttttttttgatagagcagttttgaaacactctgtagaatctgaaagtggatatttggagctatttgagggctatggtggaaaagaaaatatattcccattaaactagacagaagcattctcagaaacttctgtatgatgtttgcattaaactcacagagttgaacatacctttccatagagcagttttgaaacactctttttgtggaatccgcaagtggatatttggaccgctttgagaccttcgctggaaatgggaatatcttcacatataaactatacagaagcattctcggaaacttcttcgtgatgtgtgcattctgctcccaaagttgaaccttccttttcataaagcagttttgaaacactcttttgtacaatctaccattggatatgtggaaggctttgatgcccatggtagaaatggaaacatcctcatataaaatctagacagaaggattcacagaaactgctgtgtgatgtgtgcatcgaaatcacggagttgaacttttcttttgttagagcagttttgaaaccccgtttccgtggaatctgccagtggacatttggagcgcattgagggctatggtggagaaggaaatatcttcacataaaaactagaaagaagcattctcagaaacatctatgtgaaatgtgcattcaactcacagatttgaaccttccttttgatagaacagttttgaaacactcttttgtacaattttaggtgaatatttggagctccttgaagcctttgttggaattgtgaatatcttcacatacaaactagccagaagcattctcagaaacttctttgtgatgtgtgcgttgaactcagagagatgaacctttcctttgatagagcagttttgaaacgtgtttctgtaagatctgtatgtggatatttggggcgctttgagtcctttggtggaaacgggaatatcttctaataaaaactagacaaaaatattctcagaatcttctttgtgatgagggcattcaactaacacatttgaacatttcttttcacagagcagttttgaaacactcttttggtggaatctgccagaggatatctggagcgctttgagggctattgtgccaatggaaatatcttcccctaaaaactagacagaagcattctcagaaactacttcgtgatgtttgcattcaactcacagagttgaacatacctcttcatagagcagttttgaaaacctctttctgtagaatctgcaagtggatattcggaccactttgaggccttcataggaaacagtaatatcttcacataaaaactagatagaagcattgtcagaaagttctttgtgatgtgtgaattcaactcacagagttgaaccttcctttaatagagcagttttgaaacactctttttctagaatctgcaagtagatatttggagcgctttgaggccttcgttggaaaccggaatatcttcacaggaaaagtagatagaggcatgctcagaaacttttttgtcatatgtagattcaactcacagcgttgaacctttcttttgatagagcagttttgaaaaactcttttatcgaatctgcaagtagacatttggagtgctttgagggctgtggtgcaaaaggaaatgtcttcccatagaaactagactgaagcattctcagcaacttctttgtgacgtttgcattgatctcacagtgttgaacatacctttgcatagagtagttttgaaacactatttttgtagaatctgcaagtggatatttggactgctttgaggcctctatcggaaacgggaatatcttcacataaacactggacagaagcattctctgaaacttctttgtgatgtgtgtattcaactcacagagtggaaccatcttttttatggagcggttttgaaacagtgtttttgtagaatcagcaattggatatttggagcgctttgaggcctctggtggaaagggaatgtcttcacataaaaactggacagaagcattctcagaaacatctttgtgatgtttgcattcaactcacagagttgatccttccttttaatagggcagttttgcaacactctttttgtagaatgcaccagtgggcttttggagcacgtcaagggctttggtgaaaaaggaaatatcttcacataaaaactagacagaagtattctgtaaaactcctttgtgatgtttgcattcaactcagaaagttgaacttctctttatatagtccagttttcaaacactatttttgtagaatctgcaagtggatactgggactgctttgaggccttcgttggaaacgggattatcttcacataaaaactagactgaaggattcttagaaacttctttgtgatgtgtgcattcaactcaccgagtggaacctcacttttgatagagcagtgttgaaagacacttgttgtagaatctgcaggtggatatttggagtgctttgaagccttccttggaaacgggaatatcttcacataaaaactagacataagcattctcagaaactcctttgtgatctgtccattcagctcacagagttgaaccttccttttgatagagcagttttgaaacactctttctgtagagtctgcaagtggatatcaggagcgctttgaagcctatggtagaaaaagaaatatctggctctaaaaactagacagaagcattctgagaaacttctttgtgatgtttgcattcaactaccagagttgaaccttcctttttgatagagcagttttgaaacactctttttgtagaatctgcatgtggatatctggagcgatttgaggcctatggtcaaaaaggaaatatcttcctatgaaaaactgacaaaagcattctcagaaactactttgtgttatgtgcattcaactcacagagtacaaccttttttttgatagagcagttttgaaacactctgtagaatctgaaagtggatatttggagctctttgagggctatggtggaaaagaaaatatattcacattaaactagccagaagcatcctcagaaacttctttatgatgtttgcattaaactcacagagttgaacacaccattccatagagcagtgttgaaacactctttttggggaatccgcaagtggatatttggaccgctttgagacctttgctggaaatgggaatatcttcacatataaactagacagaagcattctcggaaacttcttcgtgatgtgtgcattctgctcccaaagttgaaccttcctcttcataaagcagttttgaaacactcttttgtacaatctaccattggatatgtggaaggctttgatgcccatggtagaaaaggaaacatcttcatataaaatctagacagaaggattcacagaaactgctgtgtgatgtgtgcatccaaatcacggagttgaacttttcttttgttagagcagttttgaaaccccgtttccgtggaatctgccagtggacatttggagcgcattgagggctatggtggagaaggaaatatcttcacataaaaactagaaagaagcattctcagaaacatctatgtgaagtgtgcattcaactcacagagttgaaccttccttttgatagaagagttttgaaacactcttttgtacaattgcaggtgaatatttggagcgatttgaagcctttgttggaaatgggaatatcctcacataaaaactagccagaagcattctcagaaacttctttgtgatgtgtgcgttgaacccagagagatgaacctttcctttgatagagcagttttgaaacgtgtttttgtaagatctgcaagcggataattggcttcgctttgtgtcctttgttggaaacgggaatatcttctaataaaaactagacagaattattctcagaatcttctttgtgatgtgggcattcaactaacacagttgaacatttcttttgacagagcagttctgaaacactctttttgtagaatccgccagtggatatttggagcgctttgagggctattgtgcaaatggaaatatctacacctaaaaactagaccgaagcattctcagaaactactttgtgatgtttgcattcaactcacagagatgaacatacctctttatagagcagttttgaaatcctctttctgtagaatctgcaagtggatattcggaccactttgaggccttcatagaaaacagtaatatcttcacataaaaactagattcaagcattctcagaaacttctttgtgatgtgtgaattcaactcacagagttgaaccttcctttaatagagcagttttgaaacactctttttgtagaatctgcaagtagatatttggagagctttgaggccttcgttggaaaccggaatatcttcacataaaaagtagatagaagcattctcagaaactttttttgatatgtagattcaactcacagcattcaacctttcttttgatagagcagtttggaaaactcttttatcaaatctgcaagtagacatttggagtgctttgagggctgtggtcgaaaaggaaatatcttcacatagaaactagactgaagcattctcagcaacttcttcgtgtcgtttgcattcatctcacactgttgaacataccttttcttagagcagttttgaaacattctttttgtagaaactgcaattggatatttggactgcgttgaggcctccactggaaacgggaatatcttcacataaacaatagacagaagcattctctgaaacttctttgtgatgtgtgtattcaactcacagagttgaaccatcttttttatggagcggttttgaaacagtgtttttgtagaatcagcaagtggatattgggagcgctttgaggcctctggtggaaagggaatgtcttcacataaaaactggacagaagcattctcagaaacatctttgtgatgtttgcattcaactcacagagttgatccttccttttaatagggcagttttgcaacactctttttgtacaatgcaccagtgggcttttggagcacgtcaagggctatggtgaaaaaggaaatatcttcacataaaaactagacagaagtattctgtaaaactcctttgtgatgtttgcattcaactcagaaagttgaacttctctttatatagtccagttttcaaacactatttttgtagaatctgcaagtggatactgggactgctttgaggccttcgttggaaacgggattatcttcacatagaaactagactgaaggattcttagaaacttctttgtgatgtgtgcattcaactcaccgagtggaacctcacttttgatagagcagagttgaaagacacttgttgtagaatctgcaggtggatatttggagtgctttgaagccttccttggaaacgggaatatcttcacataaaaactagacataagcattctcagaaactcctttgtgatctgtccattcagctcacagagttgaaccttccttttgatagagcagttttgaaacactctttctgtagagtgtgcaagtggatatcaggagcgcttcgaggcctatggcagaaaaagaaatatctggctctaaaaactagacagaagcattctcagaaacttctttgtgatgtttgcattcaactaccagagttgaaccttccttttgatagaacagttttgaaacgctctttttgtagaatctgcatgtggatacctggagcgatttttgagacctatgtctcaaaaggaaatatcttcctatgaaaaatagacaaaagcattctcagaaactactttgtgttatgtgcattccactcacagagttgaaccttttttttgatacagcagttttgaaacactctgtagaatctgaaagtggatatttgtagctctttgagggctatggtggaaaagaaaatatattcacattaaactagacagaagcattctcagaaacttctttatgatgtttgcatcaaactcacagatttgaacatacctttccatagagcagttttgaaacactctttttgtggaatccgcaagtggatatttggaccgttttgagacctttgctggaaatgggaatatcttcatatataaactggacagaatcattctcggaaacttcttcctgatgtgtgcattctgctcccaaatttgaaccttcttcttcataaagcagttttgaaacactcttttgtacaatctaccattggatatgtggaaggctttgatgcccatggtagaaaaggatacatcctcatataaaatctagacagaaggattcacagaaactgctgtgtgatgtgtgcatccaaatcacggagttgaacttttcttttgttagagcagttttgaaaccccgtttccgtggaatctgcctgtggacatttggagcgcattgagggctatggtggagaaagaaatatcttcacataaaaactagaaagaagcattctcagaaacatctatgtgaagtgtgcattcaactcacagagttgaaccttccttttgatagaagagttttgaaacactcttttgtactattgcaggtgaatatttggagcgatttgaagcctttgttggaaatgggaatatcctcacataaaaagtagccagaagcattctcagaaacttctttgtgatgtgtgcattgaacccagagagatgaaccattcctttgatagagcagttttgaaacgtgtttctgtaagatctgcaagtggatatttgggacgctttgagtcctttggtggaaacgggaatatcttctaataaaaactagaccgaaatattctcagaatcttctttgtgatgtgggcattcaactaacagagttgaacatttcttgtgacagagcagttttgaaacactctttttgtagaatctgccagtggatatttggagcgctttgagggctttgtagaaatggaaaagtcttcacctaaaaactagacagaagcaatcccagaaactactttgtgatgtttgcattaaactcatagagttgaacctacctcttcatagagcagtttggaaaacctctttttgtagaatctgcaagtggatatttggaccactttgaggccttcataggaaacagtactatcttcacataaaatctaggtagaagcattgtcagaaagttctttgtgatgtgtgaattcaactcacagagttgaaccttcctttaatagagcagttttgaaacactctttttgtagaatctgcaagtacatatttggagcgctttgaggccttcgttggaaaccggaatatcttcacataaaaagtagatagaggcattctcagaaacttttttgtgatatgtagattcagttcacagcgttgaacctttcttttgatagagcagttttgaaaaactcttttatcgaatctgtaagtagacatttggagtgctttgagggctgtggtcgaaaaggaaatatcttcacatagaaactagactgaagcattctcagcaacttctttgtgtcgtttgcattcatctcacagtgttgaacataccttttcatagagcagttttgaaacactctttttgtagaatctgcaattggatatttggactgcgttgaggcctccactggaaacgggaatatcttcacataaacactagacagaagcattctctgaaacttctttgtgatgtgtgtattcaactcacagagttgaaccatcttttttatggagcggttttgaaacagtgtttttgtagaatcagcaagtggatatttggagcgctttgaggcctctggtggaaagggaatgtcttcacataaaaactggacagaagtattctcagaaacatctttgtgatgtttgcattcaactcacagagttgatccttccttttaatagggcagttttgcaacactctttttgtagaatgcaccagtgggcttttggagcacgtcaagggctatggtgaaaaaggaaatatcttcacataaaaactagacggaagtattctgtaaaactcctttgtgatgtttgcattcaactcagaaagttgaacttctctttatatagtccagttttcaaacactatttttgtagaatctgcaagtggatactgggactgctttgaggccttcgttggaaacgggattatcttcacatagaaactagactgaaggattcttagaaacttctttgtgatgtgtgcattcaactcaccgagtggaacctcacttttgatagagcagtgttgaaagacacttgttgtagaatctgcaggtggatatttggagtgctttgaagccttccttggaaacgggaatatcttcacataaaaactagacataagcattctcagaaactcctttgtgatctgtccattcagctcacagagttgaaccttccctttgatagagcagttttgaaacactctttctgtagagtctgcaagtggatatcaggagcgctttgaagcctatggtagaaaaagaaatatctggctctaaaaactagacagaagcattctcagaaacttctttgtgatgtttgcattcaactaccagagttgaaccttccttttgatagagcagttttgaaacactctttttgtagaatctgcacgtggatatctggagcgatttttgaggcctacgttcgaaaaggaaatatcttcctatgaaaaatagacaaaagcattctcacaaactactttgagatatgtgcattcaactcacagagttgaaacttttttttgatagagcagttttgaaacactctgtagaatctgaaagtggatatttggagctatttgagggctatggtggaaaggaaaatatattcccattaaactagacagaagcatcctcagaaacttctttatgatgtttgcattaaactcacagagttgaacatacctttccatagagcagttttgaaacactctttttggggaatccacaagtggatatttggaccgctttgagacctttgctggaaatgggaatatcttcacatataaactagacagaagcattctcagaaagttcttcgtgatgtgtgcattctactcccaaagttgaaccttccttttcataaggcagttttgaaacactccttttgtacaatctacaattggatatttggaacgctttgatgcccgtggtagaaaaggtaatgtcctcatataaaaactagacagaaggattcacagaaactgctgtgtgatgtgtgcatcgaaatcacggagttgaacttttcttttgttagagcagttttgaaaccctgtttccgtggaatctgccagtggacatttggagcgcattgagggctatggtggagaaggaaatatcttcacataaaaactagaaagaagcattctcagaaacatctatgtgaagtgtgcattcaactcacagagttgaaccttccttttgatagaagagttttgaaacactcttttgtacaattgcaggtgaatatttggagcgctttgaagcctttgttggaaatgggaatatcctcacataaaaactagccagaagcattctcagaaacttctttgtgatgtgtgcattgaacccagagagatgaaccatttctttgagagagcagttttgaaacgtgtttttgtaagatctgcaagtggatatttggggcgctttgagcccttaggtggaaacgggaatatcttcgaataaaaactagacagaaatattctcagaatcttctttgtgatgtgggcattcaactaacacagttgaacatttcttttgacagagcagttttgaaacacacttttagtagaatctgccagtggatatttggggcgctttgagggctattgtgcaaatggaaatatcttcacctaaatactagacagaagcattctcagaaactacgttgtgatgtttgcattcaactcacagtgttgaacatacatcttcatagagcagttttgaaaacctcttttggtagaatctgcaagtggatattttgaccactttgaggccttcataggaaacagtaatatcttcacataaaaactagatggaagcattctcagaaacttctttgtgatgtgtgaattcaactcacagagttgaaccttcctttaatagagcagttttgaaacactctttttgtagaatctgccagtagatatttggagcgctttcaggccttcgttggaaaccggaatatcttcacataaaaagtagatagaggcattctcagaaacttttttgtgatatgtagattcaactcagagcgttgaacctttcttttgatagagcagttttgaaaaactcttttatcgaatctgcaagtagacatttggagtgctttgagggctgtggtcgaaaaggaaatatcttcacatagaaactagactgaagcattctcagcaacttctttgtgacgtttgcattcatctcacagtgttgaacataccttttcatagagcagttttgaaacactatttttgtagtatctgcaagtggatatttggactgctttgaggccttcattggaaacgggaatatattcacataaacactagacagaagcattctctgaaacttctttgtgatgtgtgtattcaactcacagagttgaaccatcttttttatggagcggttttgaaacagtgtttttgtagaatcagcaattggatatttggagcgctttgaggcctctggtggaaagggaatgtcttcacataaaaactggacagaagcattctcagaaacatctttgtgatgtttccattcaactcacagagttgatccttccttttaatagggcagttttgcaacactctttttgtacaatgcaccagtgggcttttggagcacgtcaagggctatggtgaaaaaggaaatatcttcacataaaaactagacagaagtattgtgtaaaactcctttgtgatgtttgcattcaactcagaaagttgaacttctctttatatagtccagttttcaaacactatttttgtagaatctgcaagtggatactgggactgctttgaggccttcattggaaacgggattatcttcacataaaaactagactgaaggattcttagaaacttctttgtgatgtgtgcattcaactcaccgagtggaacctcacttttgatagagcagtgttgaaagacacttgttgtagaatctgcaggtggatatttggagtgctttgaagacttccttggaaacgggaatatcttcacataaaaactagacataagcattctcagaaacttctttgtgatctgtccattcaactcacagagttgaaccttcctttttatggagccgttttgaaacactgtttttgtagaatctgcaagtggatatttggagcgctttgaggcctatggtagagaaagaaatatctgcatatcaaaactagacagaagcattctgagaaacttctttgtgatgtttgcattcaactaccagagttgaacattcctttttgatagagcagttttgaaacactctttttgtagaatctgcatgtggatatctggagcgatttgaggcctatggtcaaaaaggaaatatcttcctatgaaaaacagacaaaagcattctcagaaactacttagagatatgtgcattcaactcacagagttgaaacttttttttgatagagcagttttgaaacactctgtagaatctgaaagtggatatttggagctatttgaggggctatggtggaaaagaaaatatattcccattaaactagacagaagcatcctcagaaacttctttatgatgtttgcattaaactcacagagttgaacacaccattccatagagcagttttgaaacactctttttggggaatccgcaagtggatatttggaccgctttgagacctttgctggaaatgggaatatcttcacatataaactagacagaagcattctcggaaacttcttcgtgatgtgtgcattctgctcccaaagttgaaccttccttttcataaagcagttttgaaacactcttttgtacaatctaccattggatatgtggaaggctttgatgcccatggtagaaaaggatacatcctcatataaaatctagacagaatgattcacagaaactgctttgtgatgtgtgcattcaaatcacggagttggacctttcttttattagagcagttttgaaacactgtttctgtggaatctgccagtggacatttggagcgcattgagggctatggtggagaaggaaatatcttcacataaaaactagaaagaagcattctcagaaacacctatgtgaagtgtgcattcaactcacagagttgaaccgttcttttgatagaagagttttgaaacactcttttgtacaattgcaggtgaatatttggagcgctttgaagcctttgttggaaatgggaatatcctcacataaaaactagccagaagcattctcagaaacttctttgtgatgtgtgcgttgaacccagagagatgaacctttcctttgatagagcagttttgaaacgtgtttttgtaagatctgcaagcggataattggcttcgctttgtgtcctttggtggaaacgggaatatcttctaataaaaactagacagaattattctcagaatcttctttgtgatgtgggcattcaactaacacagttgaacatttcttttgacagagcagttctgaaacactctttttgtagaatccgccagtggatatttggagcgctttgagggcaattgtgcaaatggaaatatcttcacctaaaaactagaccgaagcattctcagaaactgctttgtgatgtttgcattcaactcacagagttgaacatacctcttcatagagcagttttgaaaacccctttttgtagaatctgcaagtggatatttggaccactttgaggccttcatagaaaacagtaatatcttcacataaagactagatggaagcattctcagaaacttctttgtgatgtgtgaattcaactcacagagtggaaccttcctttaacagagcagttttgaaacactctttttgtagaatctgcaagtagatatttggagcgctttgaggccttcgttggaaaccggaatgtcttcacataaaaagtagatagagtcattctcagaaacttttttgtgatatgtagattcaactcacagcgttgaacctttcttttgatagagcagttttgaaaaactcttttatcgagtctgcaagtagacatttggagtgctttgagggctgtggtcgaaaaggaaatatcttcacatagaaactagactgaagcattctcagcaacttctttgtgacgtttgcattcatctcacagtgttgaacataccttttcatagagcagttttgagacactatttttgtagtatctgcaagtggatatttggactgctttgaggccttcattggaaacgggaatatcttcacataaacactagacagaagcattctctgaaacttctttgtgatgtgtgtattcaactcacagagttgaaccatcttttttatggagcggttttgaaacagtgtttttgtagaatcagcaagtggatattgggagcgctttgaggcctctggtggaaagggaatgtcttcacataaaaactggacagaagcattctcagaaacatctttgtgatgtttgcattcaactcacagagttgatccttccttttaatagggcagttttgcatcactctttttgtagaatgcaccagtgggcttttggagcacgtcaagggctatggtgaaaaaggaaatatcttcacataaaaactagacagaagtattctgtaaaactcctttgtgatgtttgcattcaactcagaaagttgaacttctctttatatagtccagttttcaaacactatttttgtagaatctgcaagtggatactgggactgctttgaggccttcgttggaaacgggtatcttcacataaaaactagactgaaggattcttagaaacttctttgtgatgtgtgcattcaactcaccgagtggaacctcacttttgatagagcagtgttgaaagacacttgttgtagaatctgcaggtggatatttggagtgctttgaagccttccttggaaacgggaatatcttcacataaaaactagacataagcattctcagaaacttctttgtgatctgtccattcaactcacagagttgaaccttcctttttatggagcagttttgaaacactgtttttggagaatctgcaagtggatatttggagcacttttaggcctatggtagaaaaagaaatatctgcctattacaactagactgaagcattctcagaaactgctttgtgatatgtgcattcgactctccgagttgaaacttttttttgatagagcagttttgaaacactctgtagaatctgaaagtggatatttggagctctttgagggctatggcggaaaagaaaatatattcacattaaactagacagaagcatcctcagaaacttctttatgatgtttgcattcaactcacagagttgaacatacctttccatagagcagttttgaaacactctttttggggaatccgcaagtggatatttggaccgctttgagacctttgctggaaatgggaatatcttcacatataaactagacagaagcattcttggaaacttcttcgtgatgtgtgcattctgctcccaaagttgaacgttccttttcataaagcagttttgaaacactcttttgtacaatctaccattggatatgtggaaggctttgatgcccatggtagaaaaggaaacatcctcatataaaatctagacagaaggattcacagaaactgctttgtgatgtcagcattcaaatcacagagttgaacctttcttttgttagagcagttttgaatcgctgtttctgtggaatctgccagtggacatttggagcccattgagggcaattgtggagaaggaaatatcttacataaaaactagaaagaagcattctcagaaacatctatgtgaagtgtgccttcaacacacagagttgaaccttccctttgacagaacagttttgaaactcacttttgtacaattgcaggtgaatatttggagcgccttgaagcctttgttggaagtgggaatatcttcacatacaaactagccagaagcattctcagaaacttctttgtgatgtgtgcattgaacccagagagatgaacctttcctttgatagagcagttttgaaacgtgtttctgtaagatctgcaagtggatatttggggcgctttgagtcctttggtggaaacgggaatatcttctaataaaaactagacagaaatattctcagaatcttctttgtgatgtgggcattcaactaacacagttgaacatttcttgtgacagagcagttttgaaacactctttttgtagaatctgccagtggatatttggagcgctttcagggctattgcacaaatggaaaagtcttcacataaaaactagacagaagcattctcagaaacttctttgtgatgtttgcattcaaataccagagttgaacctccctcttcatagagcagttttgaaatcctctttttgtagaatctgcaagtggatatttggaccactttgaggccttcataggaaacagtactatcttcacataaaaactagatagaagcattctcagaaacttctttgtgatgtgtgaatttaactgagagagttgaaccttgctttaatagagcagttttgaaacactctttttgtagaatctgcaagtagatatttggagcgctttgagaccttcgttggaaaccggaatatcttcacataaaaagtagatagaggcattctcagaaacttttttgttatatgtagattcaactcacagtgttgaagctttcttttgatagagcagtttttaagaactcttttatcgaatctgcaagtagacatttggagtgctttgagggctgtagtcgaaaaggaaatatcttcacatagaaactagactgaagcattctcagcaacttctttgtgacgtttgcattcatctcacagtgttgaacataccttttcatagagcagttttgaaacactatttttgtagtatctgcaagtggatatttggactgctttgaggcctcattggaaacgggaatatcttcacataaacactagacagaagcattctctgaaacttctttgtgatgtgtgtattcaactcacagagttgaaccatcttttttatggagcggttttgaaacagtgtttttgtagaatcagcaagtggatattgggagcgctttgaggcctctggtggaaagggaatgtcttcacataaaaactggacagaagcattctcagaaacatctttgtgatgtttgcattcaactcacagagttgatccttccttttaatagggcagttttgcaacactctttttgtagaatgcaccagtgggcttttggagcacgtcaagggctatggtgaaaaaggaaatatcttctcataaaaactagactgaagtattctgtaaaactcctttgtgatgtttgcattcaactcagaaagttgaacttctctttatatagtccagttttcaaacactatttttgtagcatctgcaagtggatactgggactgctttgaggccttcgttggaaacgggattacccgtcacatagaaactagactgaaggattcttagaaacttctttgtgatgtgtgcattcaactcaccgagtggaacctcacttttgatagagcagtgttgaaagacacttgttgtagaatctgcaggtggatatttggagtgctttgaaaccttccttggaaacgggaatatcttcacataaaaactagacataagcattctcagaaacttctttgtgatctgtccattcagctcacagagttgaaccttccttttgatagagcagttttgaaacactctttctgtagagtctgcaagtggatatcaggagcgctttgaggcctatggtagaaaaagaaatatctgcatataaaaactagacagaagcattctgagaaacttctttgtgatgtttgcattcaactaccagagttgaaccttccttttgatagagcagttttgaaacactctttgtgtagaatctgcatgtggatatcaggagcgctttgaggcctatggcagaaaaagaaatatctggctctaaaaactagacagaagcattctcagcaaactactttgagatatgtgcattcaactcacagagttgaaacttttttttgatagagcagttttgaaacactctgtagaatctgaaagtggatatttggagctatttgagggctatggtggaaaagaaaatatattcccattaaactagacagaagcatcctcagaaacttctttatgatgtttgcattaaactcacagagttgaacatacctttccatagagcagttttgaaacactctttttggggaatccgcaagtggatatttggaccgctttgagacctttgctggaaatgggaatatcttcacatataaagtagacagaaccattctcagaaactgctacgtgatgtgtgcattcaactcacagagttgaaccttccttttcataaagcagttttgaaacactccttttgtacaatctacaattggatatttggaacgctttgatgcccgtggtagaaaaggaaatctcctcatataaaaactagacagaaggattcacagaaactgctgtgtgatgtgtgcatccaaatcacggagttgaacttttcttttgttagagcagttttgaaaccccgtttccgtggaatctgccagtggacatttggagcgcattgagggctatggtggagaaggaaatatcttcacataaaaactagaaaggaagcattctcagaaacatctatgtgaagtatgcattcaactcacagagttgaaccttccttttgatagaagagttttgaaacactcttttgtacaattgcaggtgaatatttggagcgctttgaagcctttgttggaaatgggaatatcctcacattaaaaactagccagaaacattctcagaaacttctttgtgatgtgtgcattgaacccagagagatgaaccgttcctttgagagagcagttttgaaacgtgtttttgtaagatctgcaagtggatatttggggcgctttgagtccttaggtggaaacgggaatatcttcgaataaaaactagacagaattattctcagaatcttctttgtgatgtgggcattcaactaacacagttgaacatttcttttgacagagcagttctgaaacactctttttgtagaatccgccagtggatatttggagcgctttgagggctattgtgcaaatggaaatatcttcaactaaaaactagaccgaagcattctcagaaactgctttgtgatgtttgcattcaactcacagagttgaacctacctcttcatagagcagtttggaaaacctcttcttgtagaatctgcaagtggatattcggaccactttgaggccttcataggaaacagtaatatcttcacataaaaactagatagaagcattctcggaaacttcttagtgatgtgtgaattcaactcacagagttgaaccttcgttaaatagagcagttttgaaacactctttttgtggaatctgcaatagatatttggagcgctttgaggccttcgttggaaaccggaatgtcttcacataaaaagtagatagaggcattctcagaaacttttttgtgatatgtagattcaactcacagtgttgaacctttcttttgattgagctgttttgaaaaactcttttatcgaatctgtaagtagacatttggagtgctttgagggctgtggtcgaaaaggaaatatcttcccatagaaactagactgaagcattctcagcaacttcttggtgacgtttgcattcatctcacagtgttgaacataccttttcatagagcagttttgaaacactatttttgtagtatctgcaagtggatatttggactgctttgaggccttcattggaaacgggaatatcttcacataaacactagacagaagcattctctgaaacttctttgtgatgtgtgtattcaactcacagagatgaaccatcttttttatggagcggttttgaaacagtgtttttgtagaatcagcaagtggatattgggagcgctttgaggcctctggtggaaagggaatgtcttcacataaaaactggacagaagcattctcagcaacatctttgtgatgtttgcattcaactcacagagttgatccttccttttaatagggcagttttgcaacactctttttgtagaatgcaccagtgggcttttggagcacgtcaagggctatggtgaaaaaggaaatatcttcacataaaaactagacagaagtattgtgtaaaactcctttgtgatgtttgcattcaactcagaaagttgaacttctctttatatagtccagttttcaaacactatttttgtagaatctgcaagtggatactgggactgctttgaggccttcattggaaacgggattatcttcacataaaaactagactgaaggattcttagaaacttctttgtgatgtgtgcattcaactcaccgagtggaacctcacttttgatagagcagtgttgaaagacacttgttgtagaatctgcaggtggatatttggagtgctttgaagccttccttggaaacgggaatatcttcacataaaaactagacataagcattctcagaaacttctttgtgatctgtccattcaactcacagagttgaaccttcgttcatatggagccgttttgaaccactgtttttgtagaatctgcaagtggatatttggagcgctttgaggcctatggtagaaaaggaaatatctgcctctaaaaactagacagaagcattctcagaaacttgtttgtgatgtttgccttcaacttccagagttgaaccttccttttgatagagcagttttgaaacactctttttgtagaatctgcatgtggatatctggagcgatttttgaggcctatggtcaaaaaggaaatatcttcctatgaaaaatagacaaaagcattctcagaaactactttgagatatgtgcatttaacccacagagttgaaacttttttttgatagagcagttttgaaacactctgtaaaatctgaaagtggatatttggagctatttgagggctatggtggaaaagaaaatatattcccattaaactagacagaagcatcctcagaaacttctttgtgatgtttgcattaaactcacagagttgaacatacctttccatagagcagttttgaaacactctttttggggaatccgcaagtggatatttggaccgctttgagacctttgctggaaatgggaatatcttcacatataaactagacagaagcattctcggaaacttctttgtgatgtgtgcattctgctcccaaagttgaaccttcctcttcataaagcagttttgaaacactcttttgtacaatctaccattggatatgtggaaggctttgatgcccatggtagaaaaggaaacatcctcatataaaatctagacagaaggattcacagaaactgctgtgtgatgtgtgcatccaaatcacggagttgaacgtttcttttgttagagcagttttgaaaccctgtttccgtggaatctgccagtggacatttggagcgcattgagggctatggtggagaaggaaatatcttcacataaaaactagaaagaagcattctcagaaacatctatgtgaagtgtgcattcaactcacagagttgaaccttccttttgatagaagagttttgaaacactcttttgtacaattgcaggtgaatatttggagcgcttagaagcctttgttggaaatgggaatatcctcacataaaaactagccagaagcattctcagaaacttctttgtgatgtgtgcattgaacccagagagatgaaccgttcctttgagagagcagttttgaaacgtgttcttgtaagatctgcaagtggatatttggggcgctttgagcccttaggtgtaaacgggaatatcttcgaataaaaactagacagaattattctcagaatcttctttgtgatgtgggcattcaactaacacagttgaacatgtcttttgacagagcagttctgaaacactctttttgtagaatccgccagtggatatttggagcgctttgagggctattgtgcaaatggaaatatcttcacctaaaaactagaccgaagcaatcccagaaactactttgtgatgtttgcattcaactcacagagttgaacctacctcttcatagagcagtttggaaaacctctttttatagaatctgcaagtggatatttggaccactttgaggccttcataggaaacagtactatcttcacataaaaactaggtagaagcattctcagaaacttctttgtgatgtgtgaattcaactcacagagttgaaccttcctttaatagagcagttttgaaacactctttttgtagaatctgccagtagatatttggagcgctttgaggccttcgttggaaaccggaatatcttcacataaaaagtagatagaggcattctcagaaacttttttgtgatatgtagattcaactgacagcgttgaacctttcttttgatagagcagttttgaaaaactcttttctcgaatctgcaagtagacatttggagtgctgtgagggctgtggtccaaaaggaaatgtcttcacaaagaaaccagactgaagcattctcagcaacttctttgtgacgtttgcattcatctcacagtgttgaacataccttttcatagagcagttttgagacactatttttgtagtatctgcaagtggatatttggactgctttgaggccttcattggaaatgggaatatcttcacataaacactagacagaagcattctctgaaacttctttgtgatgtgtgtattcaactcacagagttgaaccatcttttttatggagcggttttgaaacagtgtttttgtagaatcagcaattggatattgggagcgctttgaggcctctggtggaaagggaatgtcttcacataaaaactggacagaagtattctcagaaacatctttgtgatgtttgcattcaactcacagagttgatccttcctttcaatagggcagttttgcaacactctttttgtagaatgcaccagtgggcttttggagcacgtcaagggctatggtgaaaaaggaaatatcttcacataaaaattagacagaagtattctgtaaaactcctttgtgatgtttgcattcaactcagaaagttgaacttctctttatatagtccagttttcaaacactatttttgtagaatctgcaagtggatactgggactgctttgaggccttcattggaaacgggattatcttcacataaaaactagactgaaggattcttagaaacttctttgtgatgtgtgccttcaactcaccgagtggaacctcacttttgatagagcagagttgaaagacacttgttgtagaatctgcaggtggatatttggagtgttttgaagccttccttggaaacgggaatatcttcacataaaaactagacataagcattctcagaaactcctttgtgatctgtccattcagctcacagagttgaaccttccttttgatagagcagttttgaaacactctttctgtagagtctgcaagtggatatcaggagcgctttgtcgcctatggcagaaaaagaaatatctggctctaaaaactagacagaagcattctgagaaacttctttgtgatgtttgcattcaactaccagagttgaaccttccttttgatagagcagttttgaaacactctttgtgtaggatctgcatgtggatatcaggagcgctttgaggcctatggcagaaaaagaaatatctggctctaaaaactagacagaagcattctcagaaactactttgtgttatgtgcattcaactcacagagttgaaccttttttttgatagagccgttttgaaacactctgtagaaactgaaagtggatatttggagctatttgagggctatggtggaaaagaaaatatattcacattaaactagacagaagcattctcagaaacttctttatgatgtttgcattaaactcacagagttgaacatacctttccatagagcagttttgaaacactctttttgtggaatccgcaagtggatatttggaccgctttgagaccttcgctggaaatgggaatatcttcacatacaaattagacagaagcattctcggaaacttcttcgtgatgtgtgcattctgctcccaaagttgaaccttcctcttcataaagcagttttgaaacactcttttgtacaatctaccattggatatggggaaggctttgatgcccatggtagaaaaggaaacatcctcatataaaatctagacagaaggattcacagaaactgctgtgtgatgtgtgcatcgaaatcacggagttgaacttttcttttgttagagcagttttgaaaccctgtttccgtggaatctgccagtggacatttggagcacattgagggctatggtggagaaggaaatatcttcacataaaaactagaaagaagcattctcagaaacatctatgtgaagtgtgcattcaactcacagagttgaaccttccttttgatataagagttttgaaacactcttttgtacaattgcaggtgaatatttggagcgctttgaagcctttgttggaaatgggaatatcctcacataaaaactagccagaagcattctcagaaacttctttgtgatgtgtgcattgaacccagagagatgaaccgttcctttgagagagcagttttgaaacgtgttcttgtaagatctgcaagtggatatttggggcgctttgagccgttaggtgtaaacgggaatatcttcgaataaaaactagacagaattatctcagaaccttctttgtgatgtgggcattcaactaacacagttgaacatttcttttgacagagcagttctgaaacactctttttgtagaatccgccagtggatatttggagcgctttgagggctattgtgcaaatggaaatatcttcacctaaaaactagaccgaagcaatcccagaaactactttgtgatgtttgcattcaactcacagagttgaacctacctcttcatagagcagtttggaaaacctctttttgtagaatctgcaagtggatattcggaccactttgaggccttcataggaaacagtactatcttcacataaaaactaggtagaagcattctcagaaaattctttgtgatgtgtgaattcaactcacagagttgaaccttcctttaatagagcagttttgaaacactctttttgtagaatctgcaagtagatatttggagcgctttgaggccttcgttggaaaccggaatatcttcacataaaaagtagatagaggcattctcagaaagttttttgtgatatgtagattcaactcacagcgctgaacctttcttttgatagagcagttttgaaaaactcttttatcgaatctgcaagtagacatttggagtgctttgagggctgtggtcgaaaaggaaatatcttcacatagaaactagactgaagcattctcagcaacatctttgtgatgtttgcattcatctcacagtgttgaacataccttttcatagagcagttttgaaacactatttttgtagtatctgcaagtggatatttggactgctttgaggccttcattggaaacgggaatatcttcacataaacactagacagaagcattctctgaaacttctttgtgatgtgtgtattcaactcacagagttgaaccatcttttttatggagcggttttgaaacagtttttgtagaatcagcaattggatatttggagtgctttgaggcctctggtggaaagggaatgtcttcacataaaaactggacagaagcattctcagaaacatctttgtgatgtttgcattcaactcacagagttgatccttccttttaatagggcagttttgcaacactctttttgtagaatgcaccagtgggcttttggggcacgtcaagggctatggtgaaaaaggaaatatcttcacataaaaactagacagaagtattgtgtaaaactcctttgtgatgtttgcattcaactcagaaagttgaacttctctttatatagtccagttttcaaacactatttttgtagaatctgcaagtggatactgggactgctttgaggctatcgttggaaacaggattatcttcacataaaaactagactgaagcattctcagcaacttctttgtgacgtttgaattcatctcacagtgatgaacataccttttcatagagcagttttgaaacactatttttgtagaatctgcaattggatatttggactgcgttgagcccctcactggaaacgggaatatcttcacataaaaactagacagatgtattctcagaaacttccttgtgatctgtccattaaactcacagagttgaaccttccgttttatggagccgttttgaaacactgtttttgtagaatctgcaagtggatatttggagcgctttgaggcctaaggtagaaaaagaaatatctgcatataaaaactagacagaagcattctgagaaacttctttgtgatgtttgcattcaactaccagagttgaaccttccttttgatagagcagtttcgaaacactctttttgtagaatctgcatgtggatatctggagcgatttgaggcctatggtcaaaaaggaaatatcttcctatgaaaaacagacaaaaacattctcagaaactactttgtgttatgtgcattcaactcacagagtagaaccttttttttgatatagccgttttgaaacgctctgtagaaactgaaagtggatatttggagctatttgagggctatggtggaaaagaaaatatattcacattaaactagacagaagcatcctcagaaacttctttatgatgtttgcattaaactcacagagttgaacatacctttccatagagcagttttgaaacactgtttttggggaatccgcaagtggatatttggaccgctttgagacctttgctggaaatgggaatatcttcacatataaactagacagaagcattttcggaaacttcttcctgatgtgtgcattctgctcccaaagttgaaccttcctcttcataaagcagttttgaaacactcttttgtacaatctaccattggatatgtggaaggctttgatgcccatggtagaaaaggatacatcctcatataaaatctagacagaaggattcacagaaactgctgtgtgatgtgtgcatccaaatcacggagttgaacttttcttttgttagagcagttttgaaaccctgtttccgtggaatctgccagtggacatttggagcgcattgagggctatggtggagaaggaaatatcttcacataaaaactagaaagaagcattctcagaaacacctatgtgaagtgtgcattcaactcacagagttgaaccgttcttttgatagaagagttttgaaacactcttttgtacaattgcaggtgaatatttggagcgctttgaagcatttgttggaaatgggaatatcctcacataaaaactagccagaaacattctcagaaacttctttgtgatgtgtgcattgaacccagagagatgaaccgttcccttgagagagcagttttgaaacgtgtttttgtaagatctgcaagtggatatttggggcgctttgagtccttaggtggaaacgggaatatcttcgaataaaaactagacagaattattctcagaatcttctttgtgatgtgggcattcaactaacacagttgaacatttcttttgacagagcagttctgaaacactctttttgtagaatccgccagtggatatttggagcgctttgagggctattgtgcaaatggaaatatcttcacctaaaaactagaccgaagcaatcccagaaactactttgtgatgtttgcattcaactcacagagttgaacctacctcttcatagagcagtttggaaaacctctttttgtagaatctgcaagtggatatttggaccacattgaggccttcataggaaacagtactatcttcacataaaaactaggtagaagaattctcagaaagttctttgtgatgtgtgaattcaactcacagagttgaaccttcctttaatagagcagttttgaaacactctttttgtagaatctgccagtagatatttggagcgctttgaggccttcgttggaaaccggaatatcttcacataaaaagtagatagaggcattctcagaaacttttttgtgatatgtagattcaactcacagcgctgaacctttcttttgatagagcagttttgaaaaactcttttatcgaacctgcaagcagacatttggagtgctttgagggctgtggtcgaaaaggaaatatcttcacatagaaactagacagaagcattctcagcaacttctttgtgacgtttgcattcatctcacagtgttgaacataccttttcatagagcagttttgaaacactatttttgtagtatctgcaagtggatatttggactgctttgaggccttcattggaaacgggaatatcttcacatatactctagacagaagcattctctgaaacttctttgtgatgtgtgtattcaactcacagagttgaaccatcttttttatggagcggttttgaaacagtgtttttgtagaatcagcaagtggatatttggagcgctttgaggcctctggtggaaagagaatgtcctctcataaaaactggacagaagcattctcagaaacatctttgtgatgtttgcattcaactcacagagttgatccttccttttaatagggcagttttgcaacactctttttgtagaatgcaccagtgggcttttggagcacgtcaagggctttggtgaaaaaggaaatatcttcacataaaaactagacagaagtattctgtaaaactcctttgtgatgtttgcattcaactcagaaagttgaacttctctttatatagtccagttttcaaacactatttttgtagaatctgcaagtggatactgggactgctttgaggccttcgttggaaacgggattatcttcacatagaaactagactgaaggattcttagaaacttctttgtgatgtgtgccttcaactcaccgagcggaacctcacttttgatagagcagagttgaaagacacttgttgtagaatctgcaggtggatatttggagtgttttgaagccttccttggaaacgggaatatcttcacataaaaactagacataagcattctcagaaacccctttgtgatctgtccattcagctcacagagttgaaccttccttttgatagagcagttttgaaacactctttctgtagagtctgcaagtggatatcaggagcgctttgaggcctatggtagaaaaagaaatatctgcatataaaaactagacagaagcattctgagaaacttctttgtgatgtttgcattcaactaccagagttgaaccttccttttgatagagcagttttgaaacactctttttgtagaatctgcatgtggatatctggagcgatttgaggcctatggtcaaaaaggaaatatcttcctatgaaaaacagacaaaagaattctcagaaactacttagagatatgtgcattcaactcacagagttgaaacttttttttgatagagcagttttgaaacactctgtagaatctgaaagtggatatttggagctatttgagggctatggtggaaaagaaaatatattcccattaaactagacagaagcatcctcagaaacttctttatgatgtttgcattaaactcacagagttgaacatacctttccatagagcagttttgaaacactctttttggggaatccgcaagtggatatttggactgctttgagacctttgctggaaaagggaatatcttcacatataaactagacagaagcattctcagaaacttcttcgtgatgtgtgcattctactcccaaatttgaatcttccttttcatgaagcagttttgaaacactctatttgtgcattctacaattggatgattggaacgctttgatgcccatggtagaaaaggaaatatcctcatataaaaactagacagaaggattcacagaaactgctttgtgatgtgtgcattcaaatcacggagttggacctttcttttgttagagcagttttgaaacactgtttctgtggaatctgccagtggacatttggagcgcattgagggctatggtggagaaggaaatatcttcacagaaaaactagaaagaagcattctcagaaacatttatgtgaagcgtgcattcaactcacagagttgaaccttccttttgatagaacagttttgaaacactcttttgaacaattgcaggtgaatctttggagcgctttgaagcctttgttggaaatgggaatatcttcacacacaaactagccagaagtactctcagaaacttctttgtgatgtgtgcattgaacccagagagatgaaccgttcctttgagagagcagttttgaaacgtgtttttgtaagatctgcaagtggatatttggggcgctttgagcccttaggtggaaacgggaatatcttcgaataaaaactagacagaattattctcagcaatcttctttgtgatgtgggcattcaactaacacagttgaacatttcttttgacagagcagttctgaaacactctttttgtagaatccgccagtggatatttggagcgctttgagggctattgtgcaaacggaaatatcttcacctaaaaactagaccgaagcattctcagaaactactttgtgatgtttgcattcaactcacatagttgaacatacctcttcatagagcaggtttgaaaacttctttttgtattatctgcaagtggatatttggaccactttgaggccttcataggaaacagtaatatattctcataaaaactcgatagaagcattctcagaaacttctttgtgatgggtgaattcaactcacagtgttgaaccttcctttaatagagcagttttgaaacactctttttgtagaatctgccagtagatatttggagcgctttgaggccttcgttggaaaccggaatatcttcacataaaaagtagatagaggcattctcagaaacttttttgtgatatgtagattcaactcacagcgctgaacctttcttttgatagagcagttttgaaaaactattttatcgaatctgcaagtagacatttggagtgctttgagggctgtggtcgaaaaggaaatatcttcacatagaaactagactgaagcattctcagcaacttctttgtgacgtttgaattcatctcacagtgttgaacataccttttcatagaacagttttgaaacactatttttgtagaatctgcaattggatatttggactgcgttgagcccctcactggaaacgggaatatcttcacataaaaactagacagaagcattctctgaaacttctttgtgatgtgtgtattcatctcacagagttgaaccatcttttttatggagcggttttgaaacagtgtttttgtagaatcagcaattggatatttggagcgctttgaggcctctggtggaaagggaatgtcttcacataaaaactggacagaagcattctcagaaacatctttgtgatgtttgcattcaactcacagagttgatccttccttttaatagggcagttttgcaacactctttttgtagaatgcaccagtgggcttttggagcacgtcaagggctatggtgaaaaaggaaatatcttcacataaaaactagacagaagtattctgtaaaactcctttgtgaagtttgcattcaactcagaaagttgaacttctctttatatagtccagttttcaaacactatttttgtagaatctgcaagtggatactgggactgctttgaggccttcgttggaaacgggattatcttcacataaaaactagactgaagcattctcagcaacttctttgtgacgtttgcattcatctcacaatgttgaacatactttttcatagagcagtattgaaacactctttttgtaaaatctgcatttggatatttggactgcgttgaggccttcactggaaacgggaatttcttcacataaacactagacagaagcattctcagaaacttctttgtgatctgtccattcaactcacagagttgaaccttcgttcatatggagccgttttgaaccactgtttttgtagaatctgcaagtggatatttggagcgctttgaggcctatggtagaaaaggaaatatgtgcctctaaaaactagacagaagcattctgagaaacttctttgtgatgtttgcattcaactaccagagttgaaccttcctttttgatagagcagttttgaaacactctttttgtagaatctgcatgtggatatctggagcgatttgaggcctatggtcaaaaaggaaatatcttcctatgaaaaacagacaaaatcaatctgaggaacttctttgtgatgtgtgcattcgtcccacagagttaaacctttcttttgattgagaagttttgagactctttttgtagtacctggaagtggacatttcgaaggccttgaggcctatggtggaaaaggaaatatcttctcataaaaactagactgaagcatcctcagaaacttctttatgatgtttgcattaaactcacagagttgaacatacctttccatagagcagttttgaaacactctttttggggaatccgcaggtggatatttggaccgctttgagacctttgctggaaacgggaatatcttcacatataaactagacagaagcattctcggaaacttcttcatgatgtctgcattctgctcccaaagttgaaccttccttttcataaagcagttttgaaacactcttttgtacaatctaccattggatatgtggaaggctttgatgcccatggtagaaaaggaaacatcctcatataaaatctagacagaaggattcacagaaactgctgtgtgatgtgtgcatccaaatcacggagttgaacttttcttttgttagagcagttttgaaaccctgtttccgtggaatctgccagtggacatttggagcgcattgagggctatggtggagaaggaaatatcttcacataaaaactagaaagaagcattctcagaaacatctatgtgaagtgtgcattcaactcacagagttgaaccttccttttgatagaagagttttgaaacactcttttgtacaattgcaggtgaatatttggagcgctgtgaagcctttgttggaaatgggaatatcctcacataaaaactagccagaagcattctcagaaacttctttgtgatgtgtgcattgaacccagagagatgaaccgttcctttgagagagcagttttgaaacgtgtttttgtaagatctgcaagtggatatttggggcgctttgagtccttaggtggaaacgggaatatcttcgaataaaaactagacagaattattctcagaatcttctttgtgatttgggcattcaactaacacagttgaacatgtcttttgacagagcagttctgaaacactctttttgtagaatccgccagtggatatttggagcgctttgaggggtattgtgcaaatggaaatatcttcacctaaaaactagaccgaagcaatcccagaaactactttgtgatgtttgcattcaactcacagagttgaacctacctcttcatagagcagtttggaaaacctctttttgtagaatctgcaagtggatatttggaccactttgaggccttcataggaaacagtactatcttcacataaaaactaggtagaagcattctcagaaacttctttgtgatgtgtgaattcaactcacagagttgaaccttcctttaatagagcagttttgaaacactctttttgtagaatctgcaagtagatatttggagcgcttagaggccttcgttggaaaccggaatatcttcacatagaaagtagatagaggcattctcagaaacttttttgtgatatgtagattcaactcacagcgttgaacctttcttttgatagagcagttttgaaaaactcttttatcgaatctgcaagtagacatttggagtgctttgagggctgtggtcgaaaaggaaatatcttcacatagaaactagactgaagcattctcagcaacttctttgtgacgtttgcactcatctcacaatgttgaacatactttttcatagagcagtattgaaacactctttttgtaaaatctgcatttggatatttggactgcgttgaggccttcactggaaacgggaatttcttcacataaacactagacagaagcattctctgaaacttctttgtgatgtgtgtattcaactcacagagttgaaccatcttttttatggagcggttttgaaacagtgtttttgtagaatcagcaattggatatttggagcgctttgaggcctctggtggaaagggaatgtcttcacataaaaactggacagaagcattctcagaaacatctttgtgatgtttgcattcaactcacagagttgatccttccttttaatagggcagttttgcaacactctttttgtagaatgcaccagtgggcttttggagcacgtcaagggctatggtgaaaaaggaaatatcttcacataaaaactagaccgaagtattctgtaaaactcctttgtgatgtttgcattcaactcagaaagttgaacttctctttatatagtccagttttcaaacactatttttgtagcatctgcaagtggatactgggactgctttgaggccttcgttggaaacgggattaccttcacatagaaactagactgaaggattcttagaaacttctttgtgatgtgtgccttcaactcaccgagtggaacctcacttttgatagagcagagttgaaagacacttgttgtagaatctgcaggtggatatttggagtgctttgaagccttccttggaaacgggaatatcttcacataaaaactagacataagcattctcagaaactcctttgtgatctgtccattcagctcacagagttgaaccttccttttgatagagcagttttgaaacactctttctgtagagtctgcaagtggatatcaggagcgctttgaggcctatggtagaaaaagaaatatctgcatataaaaactagacagaagcattctcagaaacttctttgtgatgtttgcattcaactaccagagttgaaccttccttttgatagagcagttttgaaacactctttttgtagaatctgcatgtggatatctggagcgatttttgagtcctatggtcaaaaaggaaatatcttcctatgaaaaatagacaaaagcattctcacaaagtgctttgtgatatgtgcattcgactcaccgagttgaaacttttttatgatagagcagttttgaaacactctgtagaatctgaaagtggatatttggagctcttcgagggctatggcggaaaagaaaatatattcacattaaactagacagcagcattctcagaaacatctttaggatgtttgcagtaaactcacagagttgaacatacctttccgtaaagcagttttgaaaccctctgtttgtgggatctgcaagtggatatttggaccgctttgagacctttgctggaaatgggaatatcttcacatataaactagacagaagcattctcggaaacttcttcatgatgtgtgcattctgctcccaaagttgaaccttccttttcataaagcagttttgaaacactcttttgtacaatctaccattggatatgtggaaggctttgatgcccatggtagaaaaggatacatcctcatatgaaaatctagacagaaggattcacagaaactgctgtgtgatgtgtgcatccaaatcacggagttgaacttttcttttgttagagcagttttgaaaccccgtttccgtggaatctgccagtggacatttggagcgcattgagggctatggtggagaaggaaatatcttcacataaaaactagaaagaagcattctcagaaacatctatgtgaagtgtgcattcaactcacagagttgaaccttccttttgatagaagagttttgaaacactcttttgtacaattgcaggtgaatatttggagcgctttgaagcctttgttggaaatgggaatatcctcacataaaaactagccagaagcattctcagaaacttctttgtgatgtgtgcattgaacccagagacatgaacctttcctttgatagagcagttttgaaacgtgtttctgtaagatctgcaagtggatatttggggcgctttgagtcctttggtggaaacgggaatatcttctaataaaaactagacagtattattctcagaatcttctttgtgatgtgggcattcaactaacacagttgaacatgtcttttgacagagcagttctgaaacactctttttgtagaatccgccagtggatatttggagcgctttgaggggtattgtgcaaatggaaatatcttcacctaaaaactagaccgaagcaatcccagaaactactttgtgatgtttgcattcaactcacagagttgaacctacctcttcatagagcagtttggaaaacctctttttgtagaatctgcaagtggatatttggaccactttgaggccttcataggaaacagtactatcttcacataaaaactaggtagaagcattctcagaaacttctttgtgatgtgtgaattcaactcacagagttgaaccttcctttaatacagcagttttgaaacactctttttgtagaatctgccagtagatatttggagcgctttgaggccttcgttggaaaccggaatatcttcacataaaaagtagatagaggcattctaagaaacatttttgtgatatgtagattcaactcacagcgttgaacctttcttttgatagagcagttttgaaaaactcttttatcgaatctgcaagtagacatttggagtgctttgagggctgtggtcgaaaaggaaatatcttcacatagaaactagactgaagcattctcagcaacttctttgtgacgtttgcattcatctcacagtgttgaacataccttttcatagagtagttttgaaacactatttttgtagaatctgcaagtggatatttggactgcattgaggccttcattggaaacgggaatgtcttcacataaacactagacagaagaattctgagaaacttccttctgatgtgtgcgttcatctcacagagtcgaacaattgttttgattgagcagtttggaaacactctttttgtagaatctgcaagtggacatttggagtgctttgtagcctacggcagaaaaggtaatgtcttcacatgaaatctagacagaagcattctcagaaacatctttgtgatgttgcattcaactcacagagttgatccttccttttaatagggcagttttgcaacactctttttgtagaatgcaccagtgggcttttggagcacgtcaagggctatggtgaaaaaggaaatatcttcacataaaaactagacagaagtattctgtaaaactcctttgtgatgtttgcattcaactcagaaagttgaacttctctttatatagtccagttttcaaacactatttttgtagaatctgcaagtggatactgggactgctttgaggccttcgttggaaacgggattatcttcacataaaaactagactgaaggattcttagaaacttctttgtgatgtgtgcattcaactcaccgagtggaacctcacttttgatagagcagtgttgaaagacacttgttgtagaatctgcaggtggatatttggagtgctttgaagccttccttggaaacgggaatatcttcacataaaaactagacataagcattctcagaaactcctttgtgatctgtccattcagctcacagagttgaaccttccttttgatagagcagttttgaaacactctttctgtagtgtctgcaagtggatatcaggagcgctttgaggcctaggcagaaaaagaaatatctgtatataaaaactagacagaagcattctgagaaacttctttgtgatgtttgcattcaactaccagagttgaaccttcctttttgatagagcagttttgaaacactctttgtgtagaatctgcatgtggatatctggagcagatttgaggcctatggtcaaaaaggaaatatcttcctatgaaaaacagacaaaagaaatctgagaaaatactttttgatgtgtgtgttcatctcacagacttgaatcttttttttgattgagcagtttggaaatactctgttttctagaatctgcaagtggacatttggaacgctttgcggcttaaggtagaaaaggaaatatcttcaaataaaatctagacagaagcatcctcagaaacttctttatgatgtttgcattaaactcacagagttgaacatacctttccatagagcagttttgaaacactctttttgaggaatccgcaagtggatatttggaccgctttgagacctttgctggaaatgggaatatcttcacatataaactagacagaagcattctcggaaacttcttcgtgatgtgtgcattctgctcccaaagttgaaccttcctcttcataaagcagttttgaaacactcttttgtacaatctaccattggatatgtggaaggctttgatgcccatggtggaaaaggaaacatcctcatataaaatctagacagaaggattcacagaaactgctgtgtgatgtgtgcatccaaatcacggagttgaacttttcttttgttagagcagttttgaaaccctgtttccgtggaatctgccagtggacatttggagcacattgagggctatggtggagaaggaaatatcttcacataaaaactagaaagaagcattctgagaaacatctatgtgaagtgtgcattcaactcacggagttgaaccttccttttgatagaacagttttgaaacattcttttgtacaatttcaggtgaatatttggagcgcctttaagcctttgttggaaatgggaatatcttcacatacaaactagccagaagcactctcagaaacttctttgtgatgtgtgcattgaacccagagagatgaaccgttcctttgagagagcagttttgaaacgtgtttttgtaagatctgcaagtggatatttggggcgttttgagcccttaggtggaaacgggaatatcttcgaataaaaactagacagaaatattctcagaatctcctttgtgatgtgggcattcaactaacacagttgaacatttcttttcacagagcagttttgaaacactcttttggtagaatctgcatgtggatatttggagcgcttggagggctattgtgccaatggaaatatctgcccctgaaaactagacagaagcaatcccagaaactactttgtgatgtttgcattcaactcacagagttgaacctacctcttcatagagcagtttggaaaacctctttttgtagaatctgcaagtggatatttggaccactttgaggccttcataggaaacagtactatcttcacataaaaactaggtagaagcattctcagaaacttctttgtgatgtgtgaattcaactcacagagttgaaccttcctttaatagagcagttttgaaacactctttttgtagaatctgcaagtagatatttggagagctttgaggccttcgttggaaactggaatatcttcacataaaaagtagatagaggcattctcagaaatttttctgtgatatgtagattcaactcacagcgttgaacctttcttttgatagagcagttttgaaaaactcttttatcgaatctgcaagtagacatttggagtgctttgagggctgtggtcgaaaaggaaatatcttcacatggaaactagactgaagcattctcagcaacttctttgtgtcgtttgcattcatctcacagtgttgaacataccttttcatagagcagttttgaaacactcttcttgtagaatctgcaattggatatttggactgcgttgagacctccactggaaacgggaatatctccacataaacactagatagaagcattctctgaaacttctttgtgatgtgtgtattcaactcacagagttgaaccatcttttttatggagcggttttgaaacagtgttttttgtagaatcagcaattggatattgggagcgctttgaggcctctggtggaaagggaatgtcttcacataaaaactggacagaagcattctcagaaacatctttgtgatgtttgcattcaactcacagagttgatccttccttttaatagggcagttttgcaacactctttttgtagaatgcaccagtgggcttttggaacacgtcaagggctatggtgaaaaaggaaatatcttcacataaaaactagagagaaagtattgtgtaaaactcctttgtgatgtttgcattcaactcagaaagttgaacttctctttatatagtccagttttcaaacactatttttgtagaatctgcaagtggatactgggactgctttgaggccttcattggaaacgggattatcttcacataaaaactagactgaaggattcttagaaacttctttgtgatgtgtgcattcaactcaccgagtggaacctcacttttgatagagcagtgttgaaagacacttgttgtagaatctgcaggtggatatttggagtgctttgaagccttccttggaaacgggaatatcttcacataaaaactagacataagcattctctgaaacttctttgtgatgtgtctattcaactcacagagttgaaccttcctttttatggagcagttttgaaacactgtttttggagaatctgcaagtggatatttggagcgctttgaggcctatggtagaaaaagaaatatcttcatttaaatagtagacagaagcattctgagaaacttctttgtgatgtttgcattcaactaccagagttgaaccttccttttgatagagcagttttgaaacactctttgtgtagaatctgcatgtggatatctggagcgatttgaggcctatggtcaaaaaggaaatatcttcctatgaaaaacagacaaaagcattctcagaaactactttgagatatgtgcatttaactcacagagttgaaacttttttttgatagagcagttttgaaacactctgtaaaatctgaaagtggatatttggagctatttgagggctatggtggtaaagaaaatatattcccattaaactagacagaagcatcctcagaaacttctttatgatgtttgcattaaactcacagagttgaacatacctttccatagagcagttttgaaacactctttttggggaatccgcaagtggatatttggaccgctttgagacctttgctggaaatgggaatatcttcacatataaactagacagaagcattctcggaaacttcttcgtgatgtgtgcattctgctcccaaagttgaaccttcctcttcataaagcagttttgaaacactcttttgtacaatctaccattggatatgtggaaggctttgatgcccatggtagaaaaggatacatcctcatataaaatctagacagaaggattcacagaaactgctgtgtgatgtgtgcatccaaatcacggagttgaacttttcttttgttagagcagttttgaaaccctgtttccgtggaatctgccagtggacatttggagcgcattgagggctatggtggagaaggaaatatctccacataaaaactagaaagaagcattctcagaaacatctatgtgaagtgtgcattcaactcacagagttgaaccttccttttgatagaagagttttgaaacactcttttgtacaattgcaggtgaatatttggagcgctttgaagcctttgttggaaatgggaatatcctcacataaaaactagccagaagcattctcagaaacttctttgtgatgtgtgcattgaacccagagagatgaaccgttcctttgagagagcagttttgaaacgtgtttttgtaagatctgcaagtggatattaggggcgctttgagtccttaggtggaaacgggaatatcttcgaataaaaactagacagaattattctcagaaacttctttgtgatgtgggcattcaactaacacagttgaacatgtcttttgacagagcagttctgaaacactctttttgtagaatccgccagtggatatttggagcgctttgagggctattgtgcaaatgggaatatcttcacctaaaaactagaccgaagcaatcccagaaactactttgtgatgtttgcattcaactcacagagttgaacctacctcttcatagggcagtttggaaaacctctttttgtagaatctgcaagtggatatttggaccactttgaggccttcataggaaacagtactatcttcacataaaaactaggtagaagcattctcagaaacttctttgtgatgtgtgaattcaactcacagtgttgaaccttcctttaatagagcagttttgaaacactctttttgtagaatctgccagtagatatttggagcgctttgaggccttcgttggaaaccggaatatcttcacataaaaagtagatagaggcattctcagaaacttttttgtgatatgtagattcaactcacagcgctgaacctttcttttgatagagcagttttgaaaaactcttttatcgaatctgcaagtagacatttggagtgctttgagggctgtggtcgaaaaggaaatatcttcacatagaaactagactgaagcattctcagcaacttctttgtgacgtttgaattcatctcacagtgttgaacataccttttcatagagcagttttgaaacactatttttgtagaatctgcaattggatatttggacagcgttgaggccttcaatggaaacgggaatatcttcacataaaaactagacagaagcattctctgaaacttctttgtgatgtgtgtattcaactcacagagttgaaccatcttttttatggagcagttttgaaacagtgtttttgtagaatcagcaagtggatattgggagcgctttgaggcctctggtggaaagggaatgtcttcacataaaaactggacaaaagcattctcagaaacatctttgtgatgtttgcattcaactcacagagttgatccttccttttaatagggcagttttgcaacactctttttgtagaatgcaccagtgggcttttggagcacgtcaagggctatggtgaaaaaggaaatatcttcacataaaaactagacagaagtattctgtaaaactcctttgtgatgtttgcattcaactcagaaagttgaacttctctttatatagtccagttttcaaacactatttttgtagaatctgcaagtggatactgggactgctttgaggccttcgttggaaacgggtatcttcacataaaaactagactgaaggattcttagaaacttctttttgatgtgtgcattcaactcaccgagtggaacctcacttttgatagagcagtgttgaaagacacttgttgtagaatctgcaggtggatatttggagtgctttgaagccttccttggaaacgggaatatcttcacataaaaactagacataagcattctcagaaactcctttgtgatctgtccattcagctcacagagttgaaccttccttttgatagagcagttttgaaacactctttctgtagagtctgcaagtggatatcaggagcgctttgagacctatggcagaaaaagaaatatctggctctaaaaactagacagaagcattctgagaaacttctttgtgatgtttgcattcaactaccagagttgaaccttccttttgatagagcagttttgaaacattctttgtgtagaatctgcatgtggatatcaggagcgctttgaggcctatggcagaaaaagaaatatctggctctaaaaactagacagaagcattctcagaaactactttgagatatgtgcattcaactcacagagttgaaacttttttttgatagagcagttttgaaacactctgtagaatctgaaagtggatatttggagctttttgagggctatggtggaaatgaaaatatattcccattaaactagacagaaccatcctcagaaacttctttatgatgtttgcattaaactcacagagttgaacatacctttccatagagcagttttgaaacactctttttggggaatccgcaagtggatatttggaccgctttgagacctttgctggaaatgggaatatcttcacatataaactagacagaagcattctcggaaacttcttcgtgatgtgtgcattctgctcccaaagttgaaccttcctcttcataaagcagttttgaaacactcttttgtacaatctaccattggatatgtggaaggctttgatgcccatggtagaaaaggaaacatcctcatataaaatctagacagaaggattcacagaaactgctgtgtgatgtgtgcatccaaatcacggagttgaacttttcttttgttagagcagttttgaaaccccgtttccgtggaatctgccagtggacatttggagcgcattgagggctatggtggagaaagaaatatcttcacataaaaactagaaagaagcattctcagaaacacctatttgaagtgtgcattcaactcacagagttgaaccttacttttgacagaacagttttgaaactcacttttgtacaattgcaggtgaatatttggagcgccttgaagcctttgttggaagtgggaatatcttcacatacaaactagccagaagcactctcagaaacttctttgtgatgtgtgcattgaacccagagagatgaaccgttcctttgagagagcagttttgaaacgtgtttttgtaagatctgcaagtggatatttggggcgctttgagcccttaggtggaaacgggaatatcttcgaataaaaactagacagaattattctcagaatcttctttgtgatgtgggcattcaactaacacagttgaacatttcttttgacagagcagttctgaaacactctttttgtagaatccgccagtggatatttggagcgctttgagggctattgtgcaaacggaaatatcttcacctaaaaactagaccgaagcaatcccagaaactactttgtgatgtttgcattaaactcatagagttgaacctacctcttcatagagcagtttggaaaacctctttttgtagaatctgcaagtggatatttggaccactttgaggccttcataggaaacagtactatcttcacataaaaactaggtagaagcattgtcagaaagttctttgtgatgtgtgaattcaactcacagagttgaaccttcctttaatagagcagttttgaaacactctttttgtagaatctgcaagtagatatttggagcgctttgaggccttcgttggaaaccggaatatcttcacataaaaagtagatagaggcattctcagaaacttttttgtgatatgtagattcaactcacagcgctgaacctttcttttgatagagcagttttgaaaaactcttttatcgaatctgcaagtagacatttggagtgctttgagggctgtggtcgaaaaggaaatatcttcacatagaatctagactgaagcattctcagcaacttctttgtgacgtttgcattcatctcacagtgttgaacataccttttcatagagcagttttgaaacactctttttgtagaatctgcaattggatatttggactgcgttgaggccttcactggaaacgggaatatcttcacataaacactagacagaagcattctctgaaacttctttgtgatgtgtgtattcaactcacagagttgaaccatcttttttatggagcggttttgaaacagtgtttttgtagaatcagcaagtggatattgggagcgctttgaggcctctggtggaaagggaatgtcttcacataaaaactggacagaagcattctcagaaacatctttgtgatgtttgcattcaactcacagagttgatccttccttttaatagggcagttttgcaacactctttttgtagaatgcaccagtgggcttttggagcacgtcaagggctatggtgaaaaaggaaatatcttcacataaaaactagacagaagtattctctaaaactcctttgtgatgtttgcattcaactcagaaagttgaacttctctttatatagtccagttttcaaacactatttttgtagaatctgcaagtggatactgggactgctttgaggccttcgttggaaacaggattatcttctcataaaaactagactgaaggattcttagaaacttctttgtgatgtgtgcattcaactcaccgagtggaacctcacttttgatagagcagtgttgaaagacacttgttgtagaatctgcaggtggatatttggagtgctttgaagccttccttggaaacgggaatatcttcacataaaaactagacataagcattctcagaaactcctttgtgatctgtccattcagctcacagagttgaaccttccttttgatagagcagttttgaaacactctttctgtagagtctgcaagtggatatcaggagcgctttgaggcctaggcagaaaaagaaatatctgtatataaaaactagacagaagcattctgagaaacttctttgtgatgtttgcattcaactaccagagttgaaccttccttttgatagagcagttttgaaacactctttgtgtagaatctgcatgtggatatctggagcgatttgaggcctatggtcaaaaaggaaatatcttcctatgaaaaactgacaaaagcattctcagaaactactttgagatatgtgcattcaactcacagagttgaaacttttttttgatagagcagttttgaaacactctgtagaatctgaaagtggatatttggagctatttgagggctatggtggaaaagaaaatatattcccattaaactagacagaagcatcctcagaaacttctttatgatgtttgcattaaactcacagagttgaacatacctttccatagagcagttttgaaacactctttttggggaatccgcaagtggatatttggactgctttgagacctttgctggaaatgggaatatcttcacatataaactagacagaagcattctcaagaaacttcttcgtgatgtgtgcattctactcccaaagttgaaccttccttttcataaagcatttttgaaacactccttttgtacaatctacaattggatatttggaacgctttgatgcccgtggtagaaaaggaaatctcctcatataaaaactagacagaaggattcacagaaactgctgtgtgatgtgtgcatccaaatcacggagttgaacttttcttttgttagagcagttttgaaaccctgtttccgtggaatctgccagtgggcatttggagcgcattgagggctatggtggagaaggaaatatcttcacataaaaactagaaagaagcattctcagaaacatctatgtgaagtgtgcattcaactcacagagttgaaccttccttttgatagaagagttttgaaacactcttttgtacaattgcaggtgaatatttggagcgctttgaagcctttgttggaaatgggaatatcctcacataaaaactagccagaatcattctcagaaacttctttgtgatgtgtgcattgaacccagagagatgaaccgttcctttgagagagcagttttgaaacgtgtttttgtaagatctgcaagtggatatttggggcgctttgagtccttaggtggaaacgggaatatcttcgaataaaatctagacagaattattctcagaatcttctttgtgatgtgggcattcaactaacacagttgaacatttcttttgacagagcagttctgaaacactctttttgtagaatccgccagtggatatttggagcgcttggagggctattgtgcaaatggaaatatcttcacctaaaaactagaccgaagcaatcccagaaactactttgtgatgtttgcattcaactcacagagttgaacctacctcttcatagagcagtttggaaaacctctttttgtagaatctgcaagtggatatttggaccactttgaggccttcataggaaacagtactatcttaacataaaaactaggtagaagcattgtcagaaagttctttgtgatgtgtgaattcaactcacagagttgaaccttcctttaatagagcagttttgaaacactctttttgtagaatctgccagtagatatttggagcgttttgaggccttcattggaaaccggaatatcttcacataaaaagtagatagaggcattctcagaaacttttttgtgatatgtagattcaactcacagcgctgaacttttcttttgatagagcagttttgaaaaactcttttatcgaatctgcaagtagacatttggagtgctttgagggctgtggtcgaaaaggaaatatcttcacatagaaactagactgaagcattctcagcaacttctttgtgacgtttgcattcatctcacagtgttgaacataccttttcatagagcagttttgaaacactatttttgtagtatctgcaagtggatatttggactgctttgaggccttcattggaaacgggaatatcttcacataaacactagacagaagcattctctgaaacttctttgtgatgtgtgtattcaactcacagagtggaaccatcttttttatggagcggttttgaaacagtgttttggtagaatcagcaattggatatttggagcgctttgaggcctctggtggaaagggaatgtcttcacataaaaactggacagaagcattctcagaaacatctttgtgatgtttgcattcaactcacagagttgatccttccttttaatagggcagttttgcaacattctttttgtagaatgcaccagtgggcttttggagcacgtcaagggctatggtgaaaaaggaaatatcttcacaaaaaaccagacagaagtattctgtaaaactcctttgtgatgtttgcattcaactcagaaagttgaacttctctttatatagtccagttttcaaacactatttttgtagaatctgcaagtggatactgggactgctttgaggctatcgttggaaacaggattatcttcacataaaaactagactgaaggattcttagaaacttctttgtgatgtgtgcattcaactcaccgagtggaacctcacttttgatagagcagtgttgaaagacacttgttgtagaatctgcaggtggatatttggagtgctttgaagccttccttggaaacgggaatatcttcacataaaaactagacataagcatgctcagaaactcctttgtgatctgtccattcagctcacagagttgaaccttccttttgatagagcagttttgaaacactctttctgtagagtgtgcaagtggatatcaggagcgctttgaggcctatggcagaaaaagaaatatctggctctaaaaactagacagaagcattctgagaaacttctttgtgatgtttgcattcaactaccagagttgaaccttccttttgatagagcagttttgaaacactctttgtgtagaatctgcatgtggatatcaggagcgctttgaggcctatggcagaaaaagaaatatctggctctaaaatctagacagaagcattctcagaaactactttgtgttatgtgcattccactcacagagttgaaacttttttttgatagagcagttttgaaacactttgtagaatctgaaagtggatatttggagctctttgagggctatggtagaaaagaaaatatattcacattaaactagacagaagcattctcagaaacttctttatgatgtttgcattaaactcacagagttgaacatacctttccatagagcagttttgaaacactctttttgtggaatccgcaagtgaatatttggaccgctttgagaccttcgctggaaatgggaatattttcacatataaactggacagaagcattctcggaaacttcttcgtgatgtgtgcattctgctcccaaagttgaaccttccttttcataaagcagttttgaaacactcttttgtacaatctaccattggatatgtggaaggctttgatgcccatggtagaaaaggaaacatcctcatataaaatctagacagannnnnnnnnnnnnnnnnnnnnnnnnnnnnnnnnnnnnnnnnnnnnnnnnnnnnnnnnnnnnnnnnnnnnnnnnnnnnnnnnnnnnnnnnnnnnnnnnnnnagcactctcagaaacttctttaggatgtttacagtaaactcacagagttgaacatacctttccgtagagcagttttgaaacactctgtttgtgggatccgcaagtggatatttggaccgctttgagacctttgctggaaatgggaatatcttcacatataaactagacagaagcattctcagaaacttcttggtgatgggtgcattgtactccctaatttgaatcttccttctcatggagcagttttgaaacactctgtttgtgcaatctacaattggagaattggaacgcttggatgcccgtggtagaaaaggaaatatcctcatataaaaactagacagaaggattcacagaaaatgcttggggatgtgtgcattcaaatcacggagttgaatctttcttttgttagagcagttttgaaacactgtttctgtggaatctgccagcggacacttggagcgctttgagggctatggtggagaaggaaatatcttcacataaaaactagaaagaagcattctcagaaacatttatgtgaagcgtgcattcaactcacagagttgaaccttccttttgatagaacagttttgaaacactcttttgaacaattgcaggtgaatctttgagcgctttgaagcctttgttggaaatgggaatatcttcacacacaaactagccagaagcattctcagaaacttctttgtgatgtgtgcgttgaacccagagagatgaacctttccttcgatagagcagttttgaaacgcgtttttgtaagatcggcaagcggataattggcttcgctttttgtcctttggtggaaacgggaatatcttctaataaaaactagacagaaatattctcagaatcttctttgtgatgtgggcattcaactaacacagttgaacctttcttttcacagagcagttttgaaacacccttttggtagaatctgccagtggatatttggagcgctttgagggctattgtgccaatggaaatatctgcccctaaaaactagacagaaagcattctcagaaactgctttgtgatgtttgcattcaactcacagagttgaacctaccttttcatagagcagttttgaaaacctctttttgtagaatctgcaagaggatattcggaccactttgaggccttcataggaaacagtaatatcttcacataaaaactagatagaagcattgtcaggaagttctttgtgatgtgtgaattcaactcacagagttgaaccttcctttaatagagcagtgttgaaacactctttttctagaatctgcaagtagatatttggagcgcttggaggccttcgttggaaaccggaatatcttcacaggaaatgtagatagagtcattctcagaaacttttttgtgatatgtagattcaactcacagcgttgaacctttcttttgatagagcagttttgaaaaactcttttatcgagtctgcaagtagacatttggagtgctttgagggctgtggtcgaaaaggaaatatcttcacatagaaactagactgaagcattctcagcaacttctttgtgacgtttgcattcatctcacagtgttgaacatacctttccgtagagtagttttgaaacactgtttttgtagaatcggcaagtggatatttggactgctttgaggccttcatcggaaacgggaatatcttcacataaacactagagagaagcattctgagaaacttctttgtgatctatccattcaactcacagagttgaaccttcctttttatggagcagttttgaatcactgtttttggagtatctgcaagtggatatttggagcgctttgaggcctatggtagaaaaagaaatatctgcctctaaaaaccagacagaagcattccgagaaacttctctgtgatgtttgcattcaactagcagagttgaaccttcctcttgatagggcagtttggaaacactctttttgtagaatctgcatgtggatatctggagtggtttgaggcctacggtcaaaaatgtaatctcttcctgggaaaaatagacgaaagcattctcagaaactgctttgtgatatgtgcattcgactcaccgagttgaaacttttttttgatagagcagttttgaaacactctgtagaatctgaaagtgtatatttggaactatttgagggctatggcgaaaaagaaaatatattcacattaaactagacagcagcattcccagaaacttctttaggatgttttcagtaaactcacagagttgaacatacctttccgtagagcagttttgaaacactctgtttgtgggatccgcaagtggatatttggacccctttgagacctttgctggaaacgggaatatcttcacatataaactagacagaagcattctcagaaacttcttcgtgatgtgtgcattctactcccgaatttgaatcttccttttcatgaagcagttttgaaacacactgtttgtgcaatccacaattggataattggaacgctttgatgcccatggtagaaaaggaaatatcctcatataaaaactagacagaaggattcacagaaaatgctttgtgatgtgtgcattcaaatcacggagttgaatctttcttttgtcagagcagttttgaaacactgtttctgtggaatctgccagcggacacttgcagcgctttgagggctatggtggagaaggaaatatcttcccataaaaactagaaagaagcattctcagaaacatttatgtgaagcgtgcattcaactcacagagttgaaccttccttttgatacaacagttttgaaacactcttttgaacaattgcaggtgaatctttggagcgctttgaagcctttgttggaaatgggaatatcttcacacataaactagccagaagtattctcagaaacttctttgtgatgtgtgcgttgaacccagagagatgaacctttcctttgatagagcagttttgaaacgtgtttttgtaagatctgcaagcggataattggcttcgctttgtgtcctttggtggaaacgggaatatcttctaataaaaactagacagaaaaatattctcacaatcgtctttgtgatgtgggcattcaactaacacagttgaacatttcttctcacagagcagttttgaaacactcttttgctagaatctgccagtggatacttggagggctttgagggctattgtgccaatggagatatcttcccctaaaaactagacagaagcattctcagaaactacttcgtgatgtttgcattcaacacacagagttgaacatacctcttcacagagcagttttgaaaacctctttctgtagaatctgcaagtggatattcggaccactttgaggccttcacaggaaacagtaatatcttcacataaaaactagatagaaacattgtcagaatgttctttgtgatgtgtgaattcaactcacagagttgaaccttcctttaatagagcagttttgaaacactctttttctagaatctgccagtagatatttggagcgctttgaggccttcgttggaaaccggaatatctccacataaaaagtagatagaggcattctcagaaacttttctgtgaaatgtagattcaactcacagcgttgaacctttctttggatggagcagttttgaaaaacccttttatcgaatctgcaggtagacattcggggtgctttgagggctgtggtgcaaaaggaaatgtcttcccatagaaactagactgaagcattctcagcaacttcttggtaacgtttgcattcatctcacagtgttgaacatacctttccatagagtggttttgaaacactgtttttgtagaatcggcaagtggatatttggactgctttgaggccttcatcggaaacgggaatatcttcacataaacactagagagaagcattcccagaaacttctttaggatatttgcagtaaactcacagagttgaacatacctttttatggagcagttttgaaacactgtttttggagaatctgcaagtggatatttggagcgctttgaggcctatggtagaaaaagaaatatctgcctatgacaacaagacagaagcattctgagaaacttctttgtgatgtttgcattcaactaccagagttgaatcttccttttgatagggcagtttggaaacactctttttgtagaatctgcatgtggatatctggagcgatttgaggcctatggtcaaaatggaaatatcttcctgggaaaaatagacgaaagcattctcagaaactgctttgtgatatgtgcattcgactcaccgagttgaaactttttttggatagagcagttttgaaacactctgtagaatctgaaagtggatgtttggagctctttgagggctatggcggaaaagaaaatatattcacattaaactagacagcagcattctcagaaacttctttaggatgtctgcagtaaactcacagagttgaacatacctttctgtagagcagttttgaaacactctgtttgtgggatccgcaagtggatatttggacagctttgagatctttgctggaaatgggaatatcttcacatataaactagacagaagcattctcagaaacttcttcgtgatgtgtgcattctactcccgaatttgaatcttccttttcatgaagcagttttgaaacactctgtttgtgcaatccacagttggataattggaacgctttgatgcccatggtagaaaaggaaatatcctcatataaaaactagacagaagcattcacagaaaatgctttgtgatgtgtgcattcaaatcacggagttgaatgtttcttttgttagagcagttttgaatcactgtttctgtggaatctgccagcggacacttggagcgctttgagggctatggtggagaaggaaatatcttcacataaaaactagaaagaagcattctaggaaacatttatgtgaagcgtgcattcaactcacagagttgaaccttccttttgatagaacagttttgaaacactcttttgaacaattgcaggtgaatctttggagcgctttgaagcctttgttggaaatgggaatatcttcacacacaaactagccagaagtattctcagaaacttctttgtgatgtgtgcgttgaacccagagagatgaacctttcctttgatagagctgttttgaaacgtgtttttgtaagatctgcaagcggataattggcttcgctttgtgtcctttggtggaaacgggaatatcttctaataaaaactagacagagatattctcagaaacttctttgtgatgtgggcattcaactaacgcagttgaacatttcttttcacagagcagttttgaaacactcttttggtcgaatctgccagtggatatttggagcgctttgagggctattgtgccaatggaaatatctgcccctaaaaactagacagaagcattctcagaaactacttcgtgatgtctgcattcaacacacagagttgaacatacctcttcacagagcagttttgaaaacctctttctgtagaatctgcaagtggatattcgggccactttgaggccttcataggaaacagtaatatcttcacataaaaactagatagaagcattgtcagaaagttctttgtgatgtgtgaattcaactcacagagttgaaccttcctttaatagagcagttttgaaacactcttcttctagaatctgcaagtagatatttggagcgctttgaggccttcgttggaaaccggaatatcttcacataaaaagtagatagaggcattctcagaaacttttttttgatatgtagattcaactcacagcgttgaacctttctttggatggagcagttttgaaaaactcttttttcgaatctgcaggtagacatttggggtgctttgagggctgtggtgcaaaaggaaatgtcttcccatagaaactagactgaagcattctcagcaacttctttgtgacgtttgcattcatctcacagtgttgaacatacctttccatagagtagttttgaaacactatttttgtagaatctgcaagtggatatttggactgctttgaggccttcatcggaaacggcaatatcttcacataaacactagacagaagcattctcagaaacttctttgtgatctgtccattcaactcacagagttgaaacttcctttttatggagcagttttgaaacactgtttttggagaatctgcaagtggatatttggagagatttgaggcctatggtagaaaaaggaatatctacctctaaaaactagacagaagcattccgagaaacttctctgtgatgtttgcattcaactagcagagttgaaccttccttttgatagggcagtttggaaacactctttttgtagaatctgcatgtggatatctggagcggtttgaggcctacggtcaaaaaggcaataagttcctgggaaaaatagacgaaagcattctcagaaactgctttgtgatatgtgcattcgaatcaccgagttgaaacttttttttcatagagcagttttgaaacactctgtagattctgaaagtggctatttggaggtctttgagggctatggcggaaaagaaaatatattcacattaaactagacagcagcattctcagaaacttctttaggatgtttgcagtaaactcacagagttgaacatacctttccgtagagcagttttgaaacactctgtttgtgggatccgcaagtggatatttggaccgctttgagaacttggctggaaatggcaatatcttcacgtataaactagacagaagcattctcagaaacttcttcgtgatgtgtgcattctactcccaaatttgaatcttccttttcatgaagcagttttgaaacactctatttgtgcattctacaattggatgattggaacgctttgatgtccatggtagaaaaggaaatatcctcatataaaaactagacagaaggattcacagaaaatgctttgtgatgtgtgcattccattcacggagttgaatctttcttttgttagagcagttttgaaacactgtttctgtggaatctgccagcggacacttggagcgctttgagggctatggtggagaaggaaatatcttcccataaaaactagagagaagcattctcagaaccatttatgtgaagcgtgcattcaactcacagagttgaaccttccttttgatagaacagttttgaaacactcttttgaacaattgcaggtgaatatttggagggctttgaagcctttgttggaaatgggtatatcttcacacacaaactagccagaagcattctcagaaacttctttgtgatgtgtgcgttgaacccagagagacgaacctttcctttgatagagcagttttggaatgtgtttttgtaagatctgcaagcggataattggcttcgctttgtgtcctttggtggaaacgggaatatcttctaataaaaactagacagaaatattctcacaatcgtctttgtgatgtgggcattcaactaacacagttgaacatttcttctcacagagcagttttgaaacactcttttgctaggatctgccagtggatacttggagcgctttgagggctattgtgccaatggagatatcttcccctaaaaactagacagaagcattctcagaaactactttgtgatgtttgcattcaactcacagagttgaacatacctcttcatagagcagttttgaaaacctctttttgtagaatctgcaagtggatattcggaccactttgaggccttcataggaaacagtaataccttcacataaaaattagatagaagcattgtcagaaagttctttgtcatgtgtgaattcaactcacagagttgaaccttcctttaatagaccagttttgaaacactctttttctagaatctgcaagtagatatttggagtgctttgaggccttcgttggaaaccggaatatcttcacataaaacgtagatagaggcattctcagaaacttttttgtgatatgtagattcaactaacagcgttgaacttttcttttgatacagcggttttgaaaaactcttatatcgaatctgcaaatagatatttggagtgctttgagagctgtggtgcaaaaggaaatgtcttcccatagaaactagactgaagcattctcagcagcttctttgtgacgtttgcattcatctcacagtgttgaacatacctttccatagagtagttttgaagcactatttttgtagaatctgcaagtggatatttggactgctttcaggccttcatcggaaacgggaatatcttcacataaacactagacagaagcattctcagaaacttctttgtcatctgtccattcaactcacagagttgaaccttcctttttatggagcagttttgaaacactccttttggagaatctgcaagaggatatttggagcgctttgaggcctatggtagaaaaagaaatatctgcctctaaaaaccagacagaagcattctgagaaacttctttgtgatgtttgcattcaactaccagagttgaaccttccttttgatagggcagtttggaaacactctttttgtagaatctgcatgtggatatctggagcgatttgaggcctacggtccaaaaggaaatatcttcctgggaaaaatagatgaaagcattctcagaaactgctttgtgatatgtgcattcgactcaccgagttgaaactttttttggatagagcagttttgaaacactctgtagaatctgaaagtggatatttggaactctttgagggctatggcggaaaagaaaatatattcacattaaactagacagcagcattcccagaaacttctttaggatgtttgcagtaaactcacagatttgaacatacctttccgtagagcagttttgaaacactctgtttgtgggatccgcaagtggatatttggaccgctttgagacctttgctggaaacgggaatatcttcacatgtaaactggacagaagcattttcagaaacttcttcgtgatgtgtgcattctattcccaaatttgaatcttccttttcatgaagcagttttgaaacactctgtttgtgcaatccacaattggataattggaaagctttgatgcccatggtagaaaaggaaatatcctcatataaaaactagacagaaggattcacagaaaatgctttgtgatgtgtgcattcaaatcacggagttgaatctttcttttgtcagagcagttttgaaacactgttactgtggaatcttccagcggacacttggagcgctttgagggctatggtggagaaggaaatatcttcacataaaaactagaaagaagcattctcagaaccatttatgtgaagcgtgcattcaactcacagagttgaaccttccttttgatagaacagttttgaaacactcttttgaacaattgcaggtgaatatttggagggctttgaagcctttgttggaaatgggaatatcttcacacacgaactagccagaagcattctcagaaacttctttgtgatgtgtgcgttgaacccagagagatgaacttttcctttgatagagcagttttgaaacgtgtttttgtaagatcggcaagtggataattggcttcgctttgtgtcctttggtggaaacgggaatatcttctaataaaaactagacagaaatattctcagaatctcctttgtgatgtgggcattcaactaacacagttgaacatttcttttcacagagcagtttggaacactcttttggtagaatctgccagtggatatttggagcgcttggagggctattgtgccaatggaaatatctgcccctgaaaactagacagaagcattctcagaaactacttcgtgatgtttgcattcaacacacagagttgaacatacctcttcacagagcagttttgaaaacctctttctgtagaatatgcaagtggatattcggaccactttgaggccttcattggaaacagtaatatcttcacataaaaactagatagaaacattgtcagaaagttctttgtgatgtgtgaattcaactcacagagttgaatcttcctttaatagagcagttttgaaacactctttttctagaatctgccagtagatatttggagcgctttgaggccttcgttggaaaccggaatatcttcacataaaaagtagatagaggcatctcagaaacttttttgtgatatgtagattcaactcacagcgttgaacctttctttggatggagcagttttgaaaaactcttttatcgaatctgcaggtagacatttggggtgctttgagggctgtggtgcaaaaggaaatgtcttcccatagaaactagactgaagcattctcagcaacttctttgtgacgtttgcattgatctcacagtgttgaacatacctttgcatagagtagttttgaaacactatttttgtagaatctgcaagtggatatttggactgctttgaggcctccatcggaaacgggaatatcttcacataaacactggacagaagcattctcagaaacttctttgtgatctgtccattcaactcacagagttgaaccttcctttttatggagcagttttgaaacactgttcttggagaatctgcaagtggatatttggagcgctttgaggcctgtggtagaaaaagaaatatctgcctctaaaaactagacagaagcattctgagaaacttctttgtgatgtttgccttcaactaccagagttgaaccttccttttgatagggcagtttggaaacactctttttgtagaatctgcatgtggatatctggagcgaattgaggcctaccgtccaaaaggaaatatcttcctgggaaaaatagacgaaagcattctcagaaagtgctttgtgatatgtgcattcgactcaccgagttgaaacctttttttgatagagcagttttgaaacactctgtagaatctgaaagtggatatttggagctctttgagggctatggcggaaatgaaaatatattcacattaaagtagacagcagcattcccagtaaacttctttaggatgtttgcagtaaactcacagagttgaacatacctttccgtagagcagctttgaaacactctgtgtgtgggatccgcaagtggatatttggaccgctttgagacctttgctggaaacgggaatatcttcacatataaactggacagaagcattctcagaaacttcttcgtgatgtgtgcattctcctcccgaatttgaatcttccttttcatgaagcagttttgaaacactctgtttgtgcaatccacaattggataatgggaacgctttgatgcccatggtagaaaaggaaatatcctcatataaaaactagacagaaggattcacagaaaatgctttgtgatgtgtacattcaaatcacagagttgaatctttcttttgtcagagcagttttgaaacactgtttctgtggaatctgccagcggacacttggagcgctttgagggctatggtggagaaggaaatatcttcccataaaaactagagagaagcattctgagaaccatttatgtgaagcgtgcgttcctctcacagagttgaaccttccttttgatagaacagttttgaaacactcttttgaacaattgcaggtgaatatttggagggctttgaagcctttgttggaaatgggaatatcttcacacacaaactagccagaagcattctcaagaaacttctttgtgatgtgtgcgttgaacccagagagatgaacctttccttggatagagcagttttgaaacgtgtttttgtaagatctgcaagtggataattggcttcgctttgtgtcctttggtggaaacgggaatatcttctaataaaaactagacagaaatattctcagaatcttctttgtgatgagggcattcaactaacacatttgaacatttcttttcacagagcagttttgaaacactcttttggtggaatctgccagaggatatctggagcgctttgagggctattgtgccaatggaaatatcttcccctaaaaactagacagaaacattctcagaaactactttgtgatgtttgcattcaactcacagagttgaacatacctcttcatagagcagttttgaaaacctctttttgtagaatctgcaagtggatattcggaccactttgaggccttcataggaaacagtaatatcttcacataaaaactagatagaagcattgtcaggaagttctttgtgatgtgtgaattcaactcacagagttgaaccttcctttaatagagcagttttgaaacactctttttctagaatctgcaagtagatatttggagcgcttggaggccttctttggaaaccataatatcttcacaggaaatgtagatagaggcattctcagaaacttatttgtgatatgtagattcaactcacagcgttgaacctttctttggatggagcagttttgaaaaactcttttatcgaatctgcaggtagacattcggggtgctttgagggctgtggtgcaaaaggaaatgtcttcccatagaaactagactgaagcattctcagaaacttcttggtgacgtttgcattcatctcacagtgttgaacatacctttccatagagtagttttgaaacactgtttttgtagaatcggcaagtggatatttggactgcattgaggccttcatcggaaacgggaatatcttcacataaacactagagagaagcattctcagaaacttctttgtgatctgtccattcaactcacagagttgaaccttcctttttatggagcagttttgaaacactgtttttggagaatctgcaagtggatatttggagcgcttttaggcctatggtagaaaaagaaatatctgcctattacaactagactgaagcattccgagaaacttctttgtgatgtttgcattcaactagcagagttgaaccttccttttgatagggcagcttggaaacactctttttgtagaacccgcatgtggatatctggagcggtttgaggcctacggtcaaaaaggaaatatcttcctgggaaaaatagacgaaagcattctcagaaactgctttgtgatatgtgcattcgactcaccgagttgaaacatttttttgatagagcagttttgaaacactctgtagaatctgaaagtggatatttggagctctttgagggctatggcggaaaagaaaatatattcacattaaactagacagcaacattctcagaaacttccttaggatgtttgcagtaaactcacagagttgaacatacctttccgtagagcagttttgaaacactctgtttgtgggatccgcaagtggatatttggaccgctttgagacctttgctggaaatgggaatatcttcacatataaactagacagaagcattctcagaaacttcctcgtgatgtgtgcattctactcccgaatttgaatcttccttttcctgaagcagttttgaaacactctgtttgtgcgatccacaattggataattggaacgctttgatgcccatggtagaaaaggaaatatcctcatatgaaaactagacagaaggattcacagaaaatgctttgtgatgtgtgcattcaaatcacggagttgaatctttcttttctcagagcagttttgaaacactgtttctgtggaatctgccagcggacacttggagcgctttgagggctatggtggagaaggaaatatcttcccataaaaactagaaagaagcattctcagaaacatttatgtgaagcgtgcattcaactcacagagttgaaccttccttttgatacaacagttttgaaacacccttttgaacaattgcaggtgaatctttggagcgctttgaagcctttgttggaaatgggaatatcttcacacacaaactagccagaagcattctcagaaacttctttgtgatgtgtgcgttgaacccagagagatgaacctttcctttgatagagctgttttgaaacgtgtttttgtaaggtctgcaagcggataatgggcttcgctttgtgtcctttggtggaaacgggaatatcttctaataaaaactagacagaaatattctcacaatcgtctttgtgatgtgggcattcaactaacacagttgaacatttcttctcacagagcagttttgaaacactcttttgctagaatctgccagtggatacttggagcgctttgagggctattgtgccaatggagatatcttcccctaaaaactagacagaagcattctcagaaactactttgtgatgtttgcattcaactcacagagttgaacatacctcttcatagagcagttttgaaaacctctttttgtagaatctgcaagtggatattcggaccactttgaggccttcataggaaacagtaataccttcacatgaaaactagatagaagcattgtcagaaagttcgttgtgatgtgtgaatttaactcacagagttgaagcttcctttaatagagcagttttgaaacactctttttctagaatctgcaagtagatatttggagcgctttgaggccttcgttggaaaccggaatatcttcacataaaaagtagatagaggcattctcagaaacttttttgtgatatgtagattcaactcacagcgttgaacctttctttggatggagcagttttgaaaaactcttctatcgaatctgcaggtagacatttggggtgctttgagggctgtggtgcaaaaggaaatgtcttcccatagaaactagacagaagcattctcagcaacttctttgtgacgtttgcattcatctcacagtgttgaacttacctttccatagagtagttttgaagcactatttttgtagaatctgcaagtggatatttggactgctttgaggccttcatcggaaacgggaatatcttcacataaacactagacagaagcattctcagaaacttctttgtcatctgtccattcaactcacagagttgaaccttcctttttatggagcagttttgaaacactgttcttggagaatctgcaagtggatatttggagcgcttagaggcctgtggtagaaaaagaaatatctgcctctaaaaactagacagaagcattctgagaaacttctttgtgatgtttgcattcaactagcagagttgaaccttccttttgatagggcagtttggaaacactcttttgtagaatctgcatgtggatatctggagcgatttgaggcctacggtcaaaaaggaaatatcttcctgggaaaaatagacgaaagcattctcagaaactgctttgtgatatgtgcattcgactcaccgagttgaaactttttttggatagagcagttttgaaacactctgtagaatctgaaagtggatatttggagctctttgagggctatggtggaaaagaaaatatattcacattaaactatacagcagcattctcagaaacatctttaggatgtttgcagtaaactcatagagttcaacatacctttccgtagagcagctttgaaacactctgtttgtgggatccgcaagtggatatttggaccgctttgagacctttgctggaaatgggaatatcttcacatataaactagacaggaagcattctcagaaacttcttcgtgatgtgtgcattctactcccgaatttgaatcttccttttcatgaagcagttttgaaacactctgtttgtgcaatccacaattggataattggaacgctttgatgcccatggtagaaaaggaaatagcctcatataaaaactagacagaaggattcacagaaaatgctttgtgatgtgtgcattcaaatcacggtgttgaatctttcttttgttagagcagttttgaaacactgtttctgtggaatctgccagcggacacttggagcgctttgagggctacggtggagaaggaaatatcttcacataaaaactagaaagaagcattctcagaaacatttatgtgaagcgtgcattcaactcacagagttgaaccttccttttgatagaacagttttgaaacactcttttgaacattgcaggtgaatctttggagcgctttgaagcctttgttggaaatgggaatatcttcacacacaaactagccagaagcattctcagaaacttctttgtgatgtgtgcgttgaacccagagagatgaacctttccttcgatagagcagttttgaaacgcgtttttgtaagatcggcaagcggataattggcttcgctttgtgtcctttggtggaaacgggaatatcttctaataaaaactagacagaaatattctcagaatcttctttgtgatgtgggcattcaactaacacagttgaacgtttcttttcacagagcagttttgaaacactcttttggtagaatctgccagtggatatttggagcgctttgagggctcttgtgccaacggaaatatctgcccctaaaaactagacagaagcattctcagaaactactttgtgatgtttgcattcaactcacatagttgaacatacctcttcatagagcaggtttgaaaacttctttttgtattatctgcaagtggatatttggaccactttgaggccttcataggaaacagtaatatattctcataaaaactcgatagaagcattgtcagaaagttctttgtgatgtgtgaattcaactcacagagttgaaccttcctttcatagagcagttttgaaacactctttttctagaatctgcaagtagatatttggagcgctttgaggccttcgttggaaaccggactatcttcacgtaaaaagtagatagaggcattctcagaaactttttttgtgatatgtagattcaactcacagcgttgaacctttctttggatggagcagttttgaaaaactcttttatcgaatctgcaggtagacatttggggtgctttgagggctgtggtgcaaaaggaaatgtcttcccatagaaactagactgaagcattctcagcaacttcttggtgacgtttgcattcatctcacagtgttgaacatacctttccatagagtagttttgaaacactgtttgtgtagaataggcaagtggatatttggactgctttgaggccttcatcggaaacgggaatatcttcacataaacactagagagaagcattctcagaaacttctttgtgatctgtccgttcaactcacagagttgaaccttcctttttatggagcagttttgaaacactgcttgtggagaatctgcaagtggatatttggagcgccttgaggccaatggtagaaaaagaaatatctgcctctaaatactagactgaagcattccgagaaacttttttgtgatgtttgcattcaactagcagagttgaaccttccttttgtagggcagtttggaaatactcattttgtagaatctgcatgtggatatctggagcggtttgaggcctacggtcaaaaaggaaatatcttcctgggaaaaatagacgaaagcattctcagaaactgctttgtgatatgtgcattcgactcaccgagttgaaacttttttttgatagagcagttttgaaacactctgtagaatctgaaagtagatatttggagctctttgatggctatggcggaaattaaaatatattcacattaaagtagacagcagcattctcagaaacttctttaggatgtttgcagtaaactcacagagttaaacatatctttccgtagagcagttttgaaacactctgtttgtgggatccgcaagtggatatttgggcccctttgagacctttgctggaaatgggaatatcttcacatataaactagacagaagcattctcagaaacttcttcgtgatgtgtgcattctactcccaaatttgaatcttctttctcatgaagcagttttgaaacactctatttgtgcaatctacaattggataattggaaccctttgatgcccatggtagaaaaggaaatatcctcatataaaaactagacagaaggattcacagaaaatgctttgtgatgtgtgcattcaaatcacggagttgaatctttcttttgttagagcagttttgaaacactgtttctgtggaatctcccaggggacacttggagcgctttgagggctacggtggagaaggaaatatcttctcataaaaactagaaagaagcattctcagaaacatttatgtgaagcgtgcattcaactcacagagttgaaacttccttttgatagaacagttttgaaacactcttttgaacaattgcaggtgaatctttggagcgctttgaagcctttgttggaaatgggaatatcttcacacacaaactagccagaagcattctaagaaacttctttgtgatgtgtgcgatgaacccagagagatgaacctttcctttgatagagcagttttgaaaagtgtttttgtaagatctgcaagcggataattggcttccctttgtgtcctctggtggaaatgtgaatatcttctaataaaaactagacagaaatattctcagaatcttctttgtgatgtgggcattcaacaaacacagttgaacgtttcttttcacagagcagttttgaaacactcttttggtagaatctgccagtggatatttggagcgctttgagggctattgtgccaacggaaatatctgcccctaaaaagtagacagaagcattctcagaaactgctttgtgatgtttgcattcaactcacagagttgaacataccttttcatagagcagttttgaaaacctctttttgtagaatctgcaagtggatattcggaccagtttgaggccttcataggaaacagtaatatcttcacataaaaactagatagaagcattgtcagaaagttctttgtgatgtgtgaattcaactcagagagttgaaccttcctttaatagagcagttttgaaacactctttttctagaatctgccagtagatatttggagcgctttgaggccttcgttggaaaccggaatatcttcacataaaaagtagatagaggcattctcagaaactttttcgtgatatgtagattcaactcacagcgttgaacctttcttttgatagagcagttttgtaaaactcttttatcgaatctgcaagtagacatttgagtgctttgagggctgttgtgcaaaaggaaatgtcttcccatagaaactggactgaatcattctcagcaacttcttggtgacgtttgcattcatctcacagtgttgaacatacctttgcatagattagttttgaaacactgtttttgtagaatctgcaagtggacatttggactgctttgaggccttcattggaaacgggaatatcttcacataaacactagacagaagcattctcagaaacttctttgtcatctgtccattcaactcacagagttgaaccttcctttttatggagcagttttgaaacactccttttggagaatctgcaagtggatatttggagcgctttgaggcctagggtagaaacagaaatatctgcctctaaaaaccagacagaagcattcagagaaacttctttgtgatgtttgcattcaactaccagagttgaaccttccttttgatagggcagtttggaaacactctttttgtagaatctgcatgtggatatctggagcgatttgaggcctacggtcaaaaaggaaatatcttcctgggaaaaatagacgaaagcattctcagaaactgctttgtgatatgtgcattcgactcaccgagttgaaactttttttttgatagagcagttttgaaaaactctatagattctgaaagtgcatatttggagctctttgagggctatggcggaaaagaaaatatattcacattaaactagacagcagcattctcagaaacttctttaggatgtttgcagtaaactcacagagttgaacatacctttccgtagagcagttttgaaacactctgtttgtgggatccgcaagtggatatttggaccgctttgggacctttgctggaaatgggaatatcttcacgtataaactagacagaagcattctcagaaacttcctcgtgatgtgtgcattctactcccgaatttgaatcttccttttcatgaagcagttttgaaacactctgtttgtgcaatccacaattggataattggaacgctttgatgcccatggtagaaaacgaaatatcctcatataaaaactagacagaaggattcacagaaaatgctttgtgatgtgtgcattcaaatcacggagttgaatctttcttttgtcagagcagttttgaaacactgtttctgtggaatctgccagcggacacttggagcgctttgagggatatggtggagaaggaaatatcttcccataaaaactagaaagaagcattctcagaaacatttatgtgaagcgtgcattcaactcacagagttgaaccttccttgtgatacaacagttttgaaacactcttttgaacaattgcaggtgaatctttggagcgctttgaagcctttgttggaaatgggaatatcttcacacacaaactagccagaagcattctcagaaacttctttgtgatgcgtgcgtggaacccagagagatgaacctttcctttgatagagcagttttgaaacgtgtttttgtaagatctgcaagtggataatcggcttcgctttgtgtcctttggtggaaacgggaatatcttctaataaaaactagacagaaatattctcagaatcttctttgtgatgagggcattcaactaacacatttgaacatttcttttcacagagcagttttgaaacactcttttggtggaatctgccagtggatatctggagcgctttgagggctattgtgccaatggaaatatcttcccctaaaaactagacagaagcattctcagaaactacttcgtgatgtttgcattcaacacacagagttgaacatacctcttcacagaacagttttgaaaacctctttctgtagaatctgcaagtggatattcggaccactttgaggccttcacaggaaacagtaatatcttcacataaaaactagacagaagcattgtcagaaagttctttgtgatgtgtgaattcaactcacagagttgaaccttcctttaatagagcagttgtgaaacactctttttctagaatctgcaagtagatatttggagcgctttgaggccttcgttggaaaccggaatatcttcacaggaaaagtagatagaggcattctcagaaactttttcgtgatatgtggattcaactcacagcgttgaacctttcttttgatagagcagttttgtaaaactcttttatcgaatctgcatgtagacatttggagtgctttgggggctgtggtgcaaaaggaaatgtcttcccatagaaactagactaaagcattctcagcaacttctttgtgacgtttgcattcatctcacagtgttgaacatacctttccatagagtagttttgaaacactgtttttgtagaatcggcaagtggatatttggactgctttgaggccttcatcggaatcgggaatatcttcacataaacactagagagaagcattctcagaaacttctttgttatctgtccattcaactcacagagttgaaccttcctttttatggagcagttttgaaacactgtttgtggagaatctgcaagtggatatttggagcgtcttgaggccaatggtagaaaaagaaatatctgcctctaaatactagactgaagcattccgagaaacttctctgtgatgtttgcattcaactagcagagttgaaccttccttttgatagggcagtttggaaacactctttttgtagaatctgcatgtggatatactggagcggtttgaggcctacggtcaaaaaggaaatatcttcctgggaaaaatagacgaaagcattctcagaaactgctttgtgatatgtgcattcgactctccgagttgaaacttttttttgatagagcagttttgaaacactctgtagaatctgaaagtgtatatttggagctcttcgagggctatggcggaaaagaaaatatattcacattaaactagacagcagcattctcagaaacttctttaggatgtttgcagtaaactcacagagttgaacctatctttccgtagagcagttttgaaacactctgtttgtgggatccgcaaggggatatttggaccgctttgagacctttgctggaaatgggaatatcttcacatataaactagacagaagcattctcagaaacttcttcgtgatgtgtgcattctacccccaaatttgaatcttccttttcatgaagcagttttgaaacactctatttgtgcaatctacaatgggataattggaacgctttgatgcccatggtagaaaaggaaatatcctcatataaaaactagacagaaaggattcacagaaaatgctttgtgatgtgtgcattcaaatcacggagttgaatctttcttttgttagagcagttttgaaacactgtttctgtggaatctgccagcggacacttggagcgctttgagggctatggtggagaaggaaatatcttcacataaaaactagaaagaagcattctcagaaacatttatgtgaagtgtgcattcaactcacagagttgaaccttccttttgatagaacagttttgaaacactcttttgaacaattgcaggtgaatctttggagcgctttaaagcctttgttggaaatgggaatatcttcacacacaaactagccagaagcattctcagaaacttctttgtgatgtgtgcgttgaacccagagagatgaacctttcctttgatagagcagttttgaaacgtgtttttgtaagatctgcaagcggataattggcttcgctttgtgtcctttgttggaaaccggaatatcttctaataaaaactagacagaaatattctcagaatcttctttgtgatgtgggcattcaactaacacagttgaacatttcttttcacagagcagttttgaaacactcttttggtggaatctgccagtggatatttggagcgctttgagggctattgtgccaacggaaatatcttcccctaaaaactagacagaagcattctcagaaactacttcgtgatgtttgcattcaacacacagagttgaacatacctcttcacagagcagttttgaaaacctctttctgtagaatctgcaagtggatattcggaccactttgaggccttcataggaaacagtaatatctttgcctaaaaactagatagaaagcattgtcagaaagttctttgtgatgtgtgaattcaactcacagagttgaaccttcctttaatagagcagttttgaaacactctttttctagaatctgctagtagatatttggagtgcttggaggccttctttggaaaccggaatatcttcacaggaaatgtagatagaggcattctcagaaactttttcgtgatatgtggattcaactcacagcgttgaacctttcttttgatagagcagtgtggtaaaactcttttatcgaatctgcaagtagacatttggagtgctttgggggctgtggtgcaaaaggaaatgtcttcccatagaaactagactgaagcattctcagcaacttcttggtgacgtttgcattcatctcacagtgttgaacatacctttccatagagtggttttgaaacactgtttttgtagaatcggcaagtggatatttggactgctttgaggccttcatcggaaacgggaatatcttcacataaacactagacagaagcattctcagaaacttctttgtggtctgtccattcaactcacagagttgaaccttcctttttatggagcagttttgaaacactgtttttggagaatctgcaagtggatatttggagccctttgaggcctatggtagaaaaagaaatatctgcctatgagaacaagacagaagcattctgagaaacttctttgtgatgtttgcattcaactaccagagttgaaccttccttttgatagggcagtttggaaacactctttttgtagagtctggatgtggatatctggagcgatttgaggcctacggtccaaaaggaaatatcttcctgggaaaaatagacgaaagcattctcagaaagggctttgtgatatgcgcattcgactcaccgagttgaaacttttttttgatagagcagttttgaaacactctgtagaatctgaaagtggatatttggagctctttgagggctatggcggaaaagaaaatatattcacattaaaaaagtagacagcggcattctcagaaacttctttaggatgtttgcagtaaactcacagagtggaacctacctttccgtagagcagttttgaaacactctgtttgtgggatccgcaagtggatatttggaccgctttgagacctttgctggaaatgggaatatcttcacatataaactagacagaagcattctcagaaacttcttcgtgatgtgtgcattctactcgcaaatttgaatcttccttctcatgaagcagttttgaaactctctatttgtgcaatctacaattggataattggaaccctttgatgcccatggtagaaaaggaaatatcctcatataaaaactagacagaaggattcacagaaaatgctttgtgatgtgtgcattcaaatcacggagttgaatctttcttttgtcagagcagttttgaaacactgtttctgtggaatctgccagcggacacttggagcactttgagggctatggtggagaaggaaatatcttcccataaaaactagagagaagtattctcagaaacatttatgtgaagcgtgcattcaactcacagagttgaaccttacttttgatacaacagttttgaaacactcttttgaacaattgcaggtgaatctttggagcgctttgaagcctttgttggaaatgggaatatcttcacacacaaactagccagaagcattctcagaaacttctttgtgatgtgtgcgttgaacccagagagatgaacctttcctttgatagagcagttttgaaacgtgtttttgtaagatcggcaagcggataattggtttcgctttgtgtcctttggtggaaacgggaatatcttctaataaaaactagacagaaatattctcacaatctcctttgtgatgtgggcattcaactaacacagttgaacatttcttttcacagagcagttttgaaacactcttttggtagaatctggcagtggatatttggagcgctttgagggctgttgtgccaatggaaatatctgcccctaaaatctagacagaagcattctcagaaactacttcgtgatgtttgcattcaactcacagagttgaacatacctcttcacagagcagtattgaaaacctctttttgtagaatctgcaagtggatattcggagcactttgaggccttcataggaaccagtaatatcttcgcataaaaactagatagaagcattgtcagaaagttctttgtgatgtgtgaattcaactcacagagttgaaccttcctttaatagagcagttttgaaacactctttttctagaatctgcaagtagatatttggagcgcttggaggccttcgttggaaaccggaatatcttcacaggaaatgtagatagaggcattctcagatactttttcgtgatatgtggattcaactcacagcgttgaacctttcttttgatagagcagttttgtaaaactcttttatcgaatctgcaagtagacatttggagtgctttgggggctgtggtgcaaaaggaaatgtcttcccatagaaactagactgaagcattctcagcaacttctttgtgacgtttgcattcatctcacagtgttgaacatacctttccatagagaagttttgaaacactaattttgtagaatctgcaagtggatatttggactgctttgaggccttcattggaaacgggaatatcttcacataaacactagacagaagcattctcagaaacttctttgtgatctgtccattcaactcacagagttgaaccttcctttttatggagcagttttgaatcactgtttttggagaatctgcaagtggatatttggagcgctttgaggcctatggtagaaaatgaaatatctgcctctaaaaaccagacagaagcattctgagaaacttctttgtgatgtttgcattcaactaccagtagttgaaccttccttttgatagggcagtttggaaacactctttttgtagaatctgcatgtggatatctggagcgatttgaggcctacggtcaaaaaggaaatatcttcctgggaaaaatagacgaaagcattctcagaaactgctttgtgatatgtgcattcgactcagcgagttgaaacttttttttgatagagcagttttgaaacactctgtagaatctgaaagtggatatttggagctctttgagggctatggcggaaaagaaattatattcacatgaaactagacagcagcattcccagaagcttctttaggatgtttgctgtaaactcacagagttgaacatacctttccgtagagcagctttgaaacactctgtgtgtgggatccgcaagtggatatttggaccgctttgagacctttgctggaaacgggaatatcttcacatataaactggacagaagcattctcagaaacttcttcgtgatgtgtgcattgtactcccaaatttgaatcttccttctcatgcagcagttttgaaacactctgtttgtgcaatctacaattggagaattggaacgcttggatgcccgtggtagaaaaggaaatatcctcatataaaaactagacagaaggattcacagaaaatgctttgtgatgtgtgcattcaaatcacggagttgaatctttctttcgtcagagcagttttgaaacactgtttctgtggaatctgccagcggacacttggagcgctttgagggctatggtggagaaggaaatatcttcccataaaaactagaaagaagcattctcagaaacatttatgtgaagcgtgcattcaactcacagagttgaaccttccttttgatacaacagttttgaaacactcttttgaacaattgcaggtgaatccttggagcgctttgaagcctttgttggaaatgggaatatcttcacacacaaactagccagaagcattctcagaaacttctttgtgatgtgtgcgttgaacccagagagatgaacttttcctttgatagagcagttttgaaacgtgtttttgtaagatcggcaagtggataattggcttcgctttgtgtcctttgttggaaacgggaatatcttctaataaaaactagacagaaatattctcagaatctcctttttgatgtgggcattcaactaacacagttgaacatttcttttcacagagcagttttgaaacactcttttggtagaatctgccagtggatatttggagcgcttggagggctattgtgccaatggaaatatctgcccctgaaaactagacagaagcattctcagaaactactttgtgatgtttgcattcaactcacagagatgaacatacctctttatagagcagttttgaaatcctctttctgtagaatctgcaagtggatattcggaccactttgaggccttcatagaaaacagtaatatcttcacataaaaactagattcaagcattctcggaaacttctttgtgatgtgtgaattcacctcacagagttgaaccttcgataaatagagcagttttgaaacactctttttgtagaatctgcaatagatatttggagcgctttgaggccttcgttggaaaacggaatgtcttcacataaaaagtagatagaagcattctcagaaactactttgtgatctctccattcaactcacagatttgaaccttccttttgatagagcggttttgaaaaactcttatatcgaatctgcaagtagatatttggagtgctttgagggctgtggtgcaaaaggaaatgtcttcccatagaaactagactgaagcattctcagcaacttctttgtgacgtttgcattcatctcacagtgttgaacataccttttcatagagcagttttgaaacactatttttgtagtatctgcaagtggatatttggactgctttgaggccttcattggaaacgggaatatcttcacataaacactagacagaagcattctcagaaacttctttgtgatctgtccattcaactcacagagttggaccttcctttttatggagcagttttgaatcactgtttttggagaatctgcaagtggatatttggagcgctttgaggcctatggtagaaaaagaaatatctgcctctaaaaaccagacagaagcattctgagaaacttctttgtgatgtttacattcaactaccagagttgaaccttccttttgatagggcagttcggaaacactctttttgtagaatctgcatgtggatatctggagcgatttgaggcctacggtccagaaggaaatatcttcctgggaaaaatggacgaaagcattctcagaaactgctttgtgatatgtgcatttgactcaccgagttgaaacttttttttgatagagcagttttgaaacactctgtagaatctgaaagtggatatttggagctctttgagggctatggcggcaaagaaactatattcacattaaagtagacagcagcattctcagaaacttctttaggatgtttgcagtaaactcacagagttgaacatacctttccgtagagcagttttgaaacactctgtttgtgggatccgcacgtggatatttggaccgctttgagacctttgctggaaatgggagtatcttcacgtataaactagacagaagcattctcagaaacttcttcgtgatgtgtgcattgtactcccaaatttgaatcttccttcccaaggagcagttttgaaacactctgtttgtgcaatctacaattggagaattggaacgcttggatgcccgtggtagaaaaggaaatatcctcatataaaaactagacagaagtattcacagaaaatgctttgtgatgtgtgcattcaaatcacggagttgaatctttcttttgttagagcagttttgaaacactgtttctgtggaatctgccagcggacacttggagcgctttgagggctacggtggagacggaaatatcttcacataaaaactagaaagaagcattctcagaaacatttatgtgaagcgtgcattcaactcacagagttgaaccttcctttggatacaacagttttgaaacactcttttgaacaattgcaggtgaatctttggagcgctttgaagcctttgttggaaatgggaatatcttcacacacaaactagccagaagcattctcagaaacttctttgtgatgtgtgcgttgaacccagagagatgaacctttcctttgatagagcagtttggaaacgtgtttttgtaagatctgcaagcggataattggcttcgctttgtgtcctttggtggaaacgggaatatcttctaataaaaactagacagaaatattctcagaatcttctttgtgatgtgggcattcaactaacagagttgaacgtttcttttcacagagcagttttgaaacactcttttggtagaatctgccagtggatatttggtgcgctttgagggctattgtgccaacggaaatatctgtccctaaaaactagacagaagcattctcagaaactgttcgtgatgtttgcattcaactcacagacttgaacatacctcttcatagagcagttttgaaaacctctttttgtagaatctgcaagtggatattcggaccactttgaggccttcataggaaacagtaatatcttcacataaaaactagatagaagcattgtcagaaagttctttgtgatgtgtgaattcaactcacagagttgaaccttcctttaatagagcagttttgaaacactcttcttctagaatctgcacgtagatatttggagcgctttgaggccttcgttggaaaccggaatatcttcacagaaaaagtagatagaggcattctcagaaacattttttgtgatatgtagactcaactcacagcagttgaacctttctttggatggagcagttttaaaaaactcttttatcgaatctgcaggtagacatttggggtgctttgagggctgtggtgcaaaaggaaatgtcttcccatagaaactagactgaagcattctcagcaacttctttgtgacgtttgcattcatctcacagtgttgaacatacctttccatagggtagttttgaagcactatttttgtagaatctgcaagtggatatttggactgctttgaggccttcatcggaaacgggaatatcttcacataaacactagacagaagcattctcagaaatttctttgtggtctgtccattcaactcacagagttgaaccttcctttttatggagcagttttgaaacactgtttttggagaatctgcaagtggatatttggagcgctttgaggcctatggtagaaaaagaaatatctgcctatgacaacaagacagaagcattccgagaaacttctttgtgatgtttgcattcaactagcagagttgaaccttccttttgatagggcagtttggaaacactctttttgtagaatctgcatgtggatatctggagcggtttgaggcctacggtcaaaaaggtaatatcttcctgggaaaaatagacgaaagcattctcagaaactgctttgtgatatgggcattcgactcaccgagttgaaacttttttttgatagagcagttttgaaacactctgtagaatctgaaagtggatatttggagctctttgagggctatggcggaaaagaaaatatattcacattaaagtagacagcagcattctcagagacttctttaggatgtttgcagtaaactcacagagttgaacatacctttccgtaaagcagttttgaaaccttctgtttgtgggatctgcaagtggatatttggaccgctttgagacctttgctggaaatgggaatatcttcacatataaactagccagaagcattctcagaaacttcttcgtgatgtgtgcattctactcccaaagttgaaccttccttttcataaagcagttttgaaacactccttttgtacaatctacaattggataattggaacgctttgatgcccgtggaagaaaaggaaatctcctcatataaaaactagacagaaggattcacagaaaatgctttgtgatgtgtgcattcaaatcacggagttgaatctttcttttgtcagagcagttttgaaacactgtttctgtggaatctgccagcggacacttggagcactttgagggctatggtggagaaggaaatatcttcccataaaaactagaaagaagcattctcagaaccatttatgtgaagcgtgcattcaactcacagagttgaaccttccttttgatagaacagttttgaaacactcttttgaacaattgcaggtgaatctttggagcgctttgaagcctttgttggaaatgggaatatcttcacacacaaactagccagaagcattctcagaaacttctttgtgatgtgtgctttgaacccagagagatgaacctttcttttgatagagcagttttgaaacgtgtttttgtaagttcggcaagcggataattggcttcgctttgtttcctttggtggaaacgggaatatcttctaataaaaactagacagaaatattctcagaatctgctttgtgatgtgggcattcaactaacacagttgaacatttcttttcacagagcagttttgaaacactcttttggtagaatctgccagtggatatttggagcgcttggagggctattgtgccaatggaaatatctgcccctgaaaactagacagaagcattctcagaaactacttcgtgatgtttgcattcaactcaccgagttgaacatacctcttcatagagcagttttgaaaacctctttctgtagaatctgcaagtggatattcggaccactttgaggccttcataggaaacagtaatatcttcacataaaaactagatagaagcattgtcagaaagttctttgtgatgtgtgaattcaactcacagagttgaaccttcctttaatagagcagttgtgaaacactctttttctagaatctgcaagtagatatttggagcgcttggaggccttcgttggaaaccggaatatcttcacaggaaatgtagatagaggcattctcagatactttttcgtgatatgtggattcaactcacagctttgaacctttcttttgatagagcagttttgtaaaactcttttatcgaatctgcaagtagacatttggagtgctttgagggctgtggtgcaaaaggaaatgtcttcccatagaaactagactgaagcattctcagcaacttctttgtgacgtttgcattcatctcacagtgttgaacatacctttccatagagtagttttgaagcactatttttgtagaatctgcaagtggatatttggactgctttgaggccttcatcggaaacgggaataccttctcataaacactagacagaagcattctcagaaacttctttgtgatctgtccattcaactcacagagttgaaccttcctttttatggagcagttttgaaagactgtttgtggagaatctgcaagtggatatttggagcgccttgaggccaatggtagaaaaagaaatatctgcctctaaatactagactgaagcattccgagaaacttctttgtgatgtttgcattcaactagcagagttgaaccttccttttgatagggcagtttggaaacactctttgtgtagaatctgcatgtggatatctggagcggtttgaggcctacggtcaaaaaggaaatatcttcctgggaaaaatagacgaaagcattctcagaaactgctttgtgatatgggcattcgactcatcgagttgaaacttttgtttgatagagcagttttgaaacactctgtagaatctgaaagtggatatttggagatctttgagggctatggcggaaaacaaaatatattcacattaaagtagacagcagcattcttagaaacttctttaggatgtttgcagtaaactcacagagttgaacctacctttccgtagaggagttttgaaacactctgtttgtgggatccgcaagtggatatttggaccgctttgagacctttgctggaaatgggaatatcttcacatataaactagacagaagcattctcagaaacttctttgtgatgtgtgcgttgaacccagagagatgaacttttcctttgatagagcagttttgaaacgtgtttttgtaagatctgcaagcggataattggcttcgctttgtgtcctttggtggaaacgggtatatcttctaataaaaactagacagaaatattctcagaatctcctttgtgatgtgggcattcaactaacacagttgaacatttcttttaacagagcagttttgaaacactcttttggtagaatctgccagtggatatttggagcgcttggagggctattgtgccaatggaaatatctgcccctgaaaactagacagaagcattctcagaaactactttgtgatgtttgcattcaactcacagagttgaacatacctcttcatagagcagtcttgaaaacctctttttgtagaatctgcaagtggatattcggaccactttgaggccttcataggaaacagtaacatcttcacataaaaactagatagaaaacattgtcagaaagttctttgtgatgtgtgaattcaactcacagagttgaaccttcctttaatagagcagttttgaaacactctttttctagaatctgcaagtagatatttggagcgctttgaggccttcgttggaaaccggaatatcttcacaggaaaagtagatagaggcatgctcagaaacttttttgtcatatgtagattcaactcacagcgttgaacctttcttttgatagagcagttttgaaaaactcttttatcgaatctgcaagtagacatttggagtgctttgagggctgtggtgcaaaaggaaatgtcttcccatagaaactagactgaagcattctcagcaacttctttgtgacgtttgcattcatctcacagtgttgaacataccttttcatagagtagttttgaaacactatttttgtagaatctgcaagtggatatttggactgcattgaggccttcattggaaacgggaatgtcttcacataaacactagacagaagcattctcagaaactactttgtgatctgtctattcaactcacagagttgaaccttcctttttatggagcagttttgaaacactgtttttggagaatctgcaagtggatatttggagcgctttgaggcctatggtagaaaaagaaatatctgcctattacaactagacagaagcattctgagaaacttctttgtgatgtttgcattcaactaccagagttgaaccttccttttgatagggcagtttggaaacactctttttgtagaatctgcatgtggatatctggagcgatttgaggcctacggtccaaaaggaaatatcttcctgggaaaaaaagacgaaagcattctcagaaagtgctttgtgatatgtgcattcgactcaccgagttgaaacttttttttgatagagcagttttgaaacactctgtagaatctgaaagtggatagttggagctctttgacggctatggcggaaaagaaaatatattcacattaaagtagacagcagcattctcagaaacttctttaggatgtttgcagtaaactcacagagttgaacatacctttccgtagagcagttttgaaacactctgtttgtgggatccgcaagtggatatttggaccgctttgagacctttgctggaaatgggaatatcttgacgtataaactagacagaagcattctcagaaacttcttcgtgatgtgtgcagtctactcccgaatttgaatcttccttttcatgaagcagttttgaaacactctgtttgtgcaatccacaattggataattggaacgctttgatgcccatgttagaaaaggaaatatcctcatataaaaactagacagaaggattcacagaaaatgctttgtgatgtgtgcattcgaatcacggagttgaatctttcttttgttagagcagttttgaaacacggtttctgtggaatctgccagcggacacttggagcgctttgagggctatggtggagaaggaaatatcttcccataaaaactagaaagaagcattctcagaaacatgtatgtgaagcgtgcattcaactcacagagttgaaccttccttttgatacaacagttttgaaacactcttttgaacaattgcaggtgaatctttggagcgctttgaagcctttgttggaaatgggaatatcttctcacacaaactagtcagaagcattctcagaaacttctttgtgatgtgtgcgttgaacccagagagatgaacctttccttggaaagagcagttttgaaacgtgtttttgtaagatcggcaagcggataattggcttcgctttgtgtcctttggtggaaacgggaatatcttctaataaaaactagacagaaatattctcagaatctcctttgtgatgtgggcattcaactaacacagttgaacatttcttttcacagagcagttttgaaacactcttttggtagaatctgccagtggatatttggagcgcttggagggctattgggccaatggaaatatctgcccttgaaaactagacagaagcattctcagaaactgctttgtgatgtttgcattcaactcacagagttgaacataccttttcatagagcagttttgaaaacctctttttgtagaatctgcaagaggatattcggaccactttgaggccttcataggaaacagtaatatcttcacgtaaaaattagatagaaagcattgtcagaaagttctttgtgatgtgtgaattcaactcacagagttgaaccttcctttaatagagcagttttgaaacactctttttctagaatctgccagtagatatttggagcgctttgaggccttcgttggaaaccggaatatcttcacataaaaagtagatagaggcatgctcagaaacttttttgtcatatgtagattcaactcacagcgttgaacctttcttttgatagagcagttttgaaaaactcttttatcgaatctgcaagtagacatttggagtgctttgagggctgtggggcaaaaggaaatgtcttcccatagaaactagactgacgcattctcagcaacttctttgtgacgtttgcattcatctcacagtgttgaacatacctttccatagagtagttttgaagcactatttttgtagaatctgcaagtggatatttggactgctttgaggccttcatcggaaacgggaatatcttcacataaacactagacagaagcattctcagaaacttctttgtgatctgtccattcacctcacagagttgaaccttcctttttatggagcagttttgaaacactgtttgtgaagaatctgcaagtggatatttggagcgccttgaggccaatggtagaaaaagaaatatctgcctctaaatactagactgaagcattctgagaaacttctttgtgatgtttgcattcaactaccagagttgaaccttccttttgatagggcagtttggaaacactctttttgtagaatctgcatgtggatatctggagcgatttgaggcctatggtcaaaaaggaaatatcttcctgggaaaaatagacgaaagcattctcagcaactgctttgtgatatgtgcattcgactcaccgagttgaaacttttttttgatagagcagttttgaaacactctgtagaatctgaaagtggatatttggagatctttgagggctatggcggaaaagaaaatatattcacattaaagtagacagcagcattcccagaaacttctttaggttgtttgcagtaaactcacagagttgaacacacctttccgtagagcagttttgaaacactctgtttgtgggatccgcaagtggatatttggacccctttgagacctttgctggaaatgggaatatcttcacatataaactagacagaagcattctcagaaacttcttcgtgatgtgtgtattctactcccaaatttgaatcttccttttcatgaagcagttttgaaacactctatttgtgcattctacaattggatgattggaacgctttgatgcccatggtagaaaaggaaatatcctcatataaaaactagacagaaggattcacagaaaatgctttgtgatgtgtgcattcaaatcacggagttgaatctttcttttgttagagcagttttgaaacactgtttctgtggaatctgccagcggacccttggagcgctttgagggctacggtggagaaggaaatatcttcacataaaaactagaaagaagccttctcagaaacatgtatgtgaagcgtgcattcaactcacagagttgaaccttccttttgatagaacagttttgaaacactcttttgaacaattgcaggtgaatctttggagcgctttgaagcctttgttggaaatgggaatatcttcacacacaaactagccagaagcattctcagaaacttctttgtgatgtgtgcgttgaacccagagagatgaacctttcctttgatagagcagtttggaaacgtgtttttgtaagatcggcaagcggataattggcttcgctttgtgtcctttggtggaaacgggaatatcttctaataaaaactagacagaaatattctcagaatcttctttgtgatgtgggtattcaactaacacagttgaacctttcttttgacagagcagttttgaaacacacttttagtagaatctgcccgtggatatttggggcgctttgagggctattgtgcaaatggaaatatcttcacctaaatactagacagaagcattctcagaaactgctttgtgatgtttgcattcaactgacagagttgaacatacctcttcatagagcagttttgaaaacctctttttgtagaatctgcaagtggatattcggaccactttgaggccttcataggaaacagtaatatcatcacacaaaaactagatagaagcattgtcagaaagttcgttgtgatgtgtgaattcaactcacagagttgtagcttcctttaatagagcagttttgaaacactctttttctagagtctgcaagtagatatttggagcgctttgaggccttcgttggaaaccggaatatcttcacataaaaagtagatagaggcatgctcagaaacttttttgtcatatgtagattcaactcacagcgttgaacctttcttttgatagagcagttttgaaaaactcttttatcgaatctgcaagtagacatttggagtgctttgacggctctggtgcaaaaggaaatgtcttcccatagaaactagactgaagcattctcagcaacttcttggtgacgtttgcattcatctcacagtgttgaacatacctttccatagagtggttttgaaacactgtttttgtagaatcggcaagtgggtgtttggactgctttgaggccttcatcggaaacgggaatatcttcacataaacactagagagaagcactctcagaaacttctttgtgatctgtccattcaactcacagagttgaaccttcctttttctggagcagttttgaaacactctttttggagaatctgcaagtggatatttggagcgctttgaggcctatggtagaaaaagaaatatctgcctctaaaaaccagacagaagcattccgagaaacttctctgtgatgtttgcattcaagtagcagagttgaaccttccttttgatagggtagtttggaaacactctttttgtagaatctgcatgtggatatctgtagcggtttgaggcctacggtcaaaaaggaaatatcttcctgggaaaaatagacgaaagcattctcagaaagggctttgtgatatgcgcattcgactcaccgagttgaaacttttttttgatagagcagttttgaaacactctgtagaacctgaaagtggatatttggagctctttcagggctatgacggaaaagaaaatatattcacattaaagtagacagcagcattctcagaaacttctttaggatgtttgcagtaaactcacagagttgaacctacctttccgtagagcagttttgaaacactttgtttgtgggatccgcaagtggatatttggaccgctttgagacctttgctggaaatgggaatatcttcacatataaactagacagaagcattctcagaaacttcctcttgatgtgtgcattctactcccgaatttgaatcttccttttcatgaagcagttttgaaacactctgtttgtgcaatccacaattggataattggaacgctttgatgcccatggtagaaaaggaaatatcctcatataaaaactagacagaaggattcacagaaaatgctttgtgatgtgtgcattcaaatcaccggagttgaatctttcttttgttagagcagttttgaaacactgtttctgtggaatctgccagcggacacttggagcgctttgagggctatggtggagaaggaaatatcttcacataaaaactagaaagaagcattctcggaaacatttatgtgaagcgtgccttcaactcacagagttgaaccttccttttgatagaacagttttgaaacactcttttgaacaattgcaggtgaatctttggagcgctttgaaggctttgttggaaatgggaatatcttcccacacaaactagccagaagcattctcagaaacttctttgtgatgtgtgcgttgaacccagcagagatgaacctttcctttgatagagcagttttgaaacgtgtttttgtaaggtctgcaagcggataatgggcttcgctttgtgtcctttggtggaaacgggaatatcttctaataaaaactagacagaaatattctcagaatctcctttgtgatgtgggcattcaacttacacagttgaacatttcttttcacagagcagttttgaaacactcttttggtagaatctgccagtggatatttggagcgcttggagggctattgtgccaatggaaatatctgcccctgaaaactagacagaagcattctcagaaactgctttgtgatgtttgcattcaactcacagagttgaacctacctcttcatagagcagtttggaaaacctcttcttgtagaatctgcaagtgggtattcggaccactttgaggccttcataagaaacagtaatatcttcacataaaaactagatagaagcattgtcagaaagctctttgtgatgtgtgaattcaactcacagagttgaaccttcctttaatagagtagttttgaaacactctttttctagaatctgcaagtagatatttggagtgctttgaggccttcgttggaaaccggaatatcttcacaggaaaagtagatagaggcattctcagaaacttttttgtgatatgtagattcatctcacagcgttgaacctttcttttgatagagtagtttggaaaaactcttttatcgaatctgcaagtagacatttggagtgctttgagggctgtggtgcaaaaggaaatgtcttcccatagaaactagactgaagcattctcagcaacttctttgtgacgtttgcattgatctcacagtgttgaacatacctttgcatagagtagttttgaaacactatttttgtagaatctgcaagtggatatttggactgctttgaggccttcatcggaaacgggaatatcttcacataaacactggacagaagcatcctcagaaacttctttgtcatctgtccattcaactcacagagttgaaccttcctttttctggagcagttttgaaacactctttttggagaatctgcaagtggatatttggagcgctttgaggcctatggtagaaaaagaaatatctgcccctaaacaccagacagaagcattccgagaaacttctttgtgatgtttgcattcaactagcagagttgaaccttccttttgatagggcagtttggaaacactctttttgtagaacctgcatgtggatatctggagcggtttgaggcctacggtcaaaaaggaaatatcttcctgggaaaaatagacgaaagcattctcagaaactgctttgtgatatgtgcattcgactctccgagttgaaacttttttttgatagagcagttttgaaacactctgtagaatctgaaagtggatatttggagctcttcgagggctatggcggaaaagaaaatatattcacattaaactagacagcaagcattcccagaaacttctttaggttgtttgcagtaaactcacagagttgaacacacctttccgtagagcagttttgaaacactctgtttgtgggatccgcaagtggatatttggacccctttgagacctttgctggaaacgggaatatcttcacatataaactagacagaagcattctcagaaacttcttcggtgatgtgtgcattgtactcccaaatttgaatcttccttctcatggagcagttttgaaacactctgtttgtgcaatctacaattggagaattggaacgcttggattcccatggtagaaaaggaaatatcctcatataaaaactagacagaaggattcacagaaaatgctttgtgatgtgtgcattcaaatcacggagttgaatctttcttttgttagagcagttttgaaagactgtttctgtggaatctgccagcggacacttggagcgctttgagggctacggtggagaaggaaatatcttcacataaaaactagaaagaagcattctcagaaacatttatgtgaagcgtgcattcaactcacagagttgaaccttccttttgatacaacagttttgaaacactcttttgaacaattgcaggtgaatctttggagcgctttgaagcctttgttggaaatgggaatatcttcacacacaaactatccagaagcattctcggaaacttctttgtgatgtgtgcgttgaacccagagagatgaacctttcctttgatagagcagttttgaaacgtgtttttgtaagatctgcaagcggatagttggcttcgctttgtgtcctttggtggaaacgggaatatcttctaataaaaactagacagaaatattctcagaatcttcttcgtgatgtgggcattcaactaacacagttgaacctttcttttcacagagcagttttgaaacacccttttggtagaatctgccagtggatatttggagcgctttgagggctattgtgccaacggaaatatctgcccctaaaaactagacagaagcattctcagaaactgcttcgtgatgtttgcattcaactcacagggttgaacatacctctgcatggagcagttttgaaaacctctttttgtagaatctgcaagtggatattcggaccactttgaggccttcataggaaacagtaatatcttcacataaaaactagatagaagcattgtcagaaagttctttgtgatgtgtgaattcaactcacagagttgaaccttccttcaatagagcagttgtgaaacattctttttctagaatctgcaagtagatacttggagcgctttgaggccttcgttggaaaccggaatatcttcacaggaaaagtagatagaggcattctcagaaacttttttgtgatatgtagattcaactcacagcgttgaacctttctttggatggagcagttttgaaaaactcttttatcgaatctgcaggtagacatttggggtgctttgagggctgtggtgcaaaaggaaatgttcttcccatagaaactagactgaagcattctcagcaacttcttggtgacgtttgcattcatctcacagtgttgaacatacctttccatagagtggttttgaagcactgtttctgtagaatcggcaagtggatatttggactgctttgaggccttcatcggaaacgggaatatcttcacataaacactagagagaagcattctcagaaacttctttgtcatctgtccattcaactcacagagttgaaccttcctttttatggagcagttttgaaacactccttttggagaatctgcaagtggatatttggagcgctttgaggcctatggtagaaaaagaaatatctgcctctaaaaaccagacggaagcattccgagaaacttctgtgtgatgtttgcattcaactagcagagttgaaccttccttttgatagggcagtttggaaacactctttttgtagaatctgcatgtggatatctggagcggtttgaggcctacggtcaaaaaggaaatatcttcctgggaaaaatagacgaaagcattctcagaaagtgctttgtgatatgtgcattcgactcagcgagctgaaacttttttttgatagagcagttttgaaacactctgtagaatctgaaagtggatatttggagctctttgagggctatggcggaaaagaaaatatattcacattaaaaaagtagacagcagcattctcagaaacttctttaggatgtttgcagtaaactcgcagagtttaacatacctttccgtagagcagttttgaaacactctgtttgtgggatccgcaagtggatatttggaccgctttgagacctttgctggaaatgggaatatcttcacgtataaactagacagaagcattctcagaaacttctttttgatgtgtgcattgtactcccaaatttgaatcttccttctcatgtagcagttttgaaacactctgtttgtgcaatctacaattggataattggaaccctttgatgcccatggtagaaaaggaaatatcctcatataaaaactagacagaaggattcacagaaaatgctttgtgatgtgtgcattcaaatcacggagttgaatctttcttttgttagagcagttttgaaacactctttctgtggaatctgccagcggacacttggagtgctttgagggctgtggtggagaaggaaatatcttcccataaaaactagaaagaagcattctcagaaacatttatgtgaagcgtgcattcaactcacagagttgaaccttccttttgatacaacagttttgaaacacgcttttgaacaattgcaggtgaatctttggagcgctttgaagcctttgttggaaatgggaatatcttcacacacaaactagccagaagcattctcagaaacttctttgtgatgtgtgcgttgaacccagagagatgaacctttcctttgatagagcagttttgaaacgtgtttttgtaagatctgcaagtggataattgtcttcgctttgtgtcctttggtggaaacgggaatatcttctaataaaaactagacagagatattctcagaaatttctttgtgatgtgggcattcatctaacacagtcgaagatttcttttcacagagcagttttgaaacactcttttggtcgaatctgccagtggatatttggagcgctttgagggctattgtgccaatggaaatatctgcccctaaaaactagacagaagcattctcagaaactactttgtgatgtttgcattcaactcacagagttgaacatacctcttcatagagcagttttgaaaacctcttttggtagaatctgcaagtagatattcggaccactttgaggccttcataggaaacagtaataccttcacataaaaactagatagaagcattgtcaggaagttctttgtgatgtgtgaattaaactcacagagttgaaacttcctttaatagagcagtgttgaaacactctttttctagaatctgcaaggagatatttggggcgcttggaggccttcgttgtaaaccggaatatcttcacaggaaatgtagatagacgcattctcagaaactctttgtgatatgtagattcaactcacagcgttgaacctttctttggatggagcagttttgaaaaactcttttatcgaatctgcaggtagacatttggggtgctttgagggctgtggtgcaaaaggaaatgtcttcccatagaaactagcctgaagcattctcagcaaattccttgtgacgtttgcattcatctcacagtgttgaacatacctttccatagagtagttttgaaacactatttttgtagaatctgcaagtggatatttggactgctttgaggccttcatcggaaacgggaatatcttcacataaacactagacagaagcattctcagaaacttctttgtgatctctccattcaactcacagagttgaaccttcctttttatggagcagttttgaaacactccttttggagaatctgcaagtggatatttggagcgcgttgaggcctatggtagaaaaagaaatatctgcctctaaaaaccagacagaagcattctgagaaacttctttgtgatgtttgccttcaactaccagagttgaaccttccttttgatagggcagtttggaaacactctttttgtagaatctgcatgtggatatctggaacgatttgaggcctacggtccaaaaggaaatatcttcctgggaaagatagacgaaagcattctcagaaagtgctttgtgatatgtgcattcgactcaccgagttgaaacctttttttgatagagcagttttgaaacactctgtagaatctgaaagtggatatttggagctctttgagggctatggcggaaaagaaaatatattcacattaaagtagacagcagcattctcagaaacttctttaggatgtttgcagtaaactcacagagttgaacatacctttccgtagagcagttttgaaacactctgtctgtgggatccgcaagtggatatttgggccgctttgagacctttgctggaaatgggaatatcttcacatataaactagacagaagcattctcagaaacttcctcgtgatgtgtgcattctactcccgaatttgaatcttccttttcatgaagcagttttgaaacactctgtttgtgcaatccacaattggataattggaacgctttgatgcccatggtagaaaaggaaatatcctcatataaaaactagacagaaggattcacagaaaatgctatgtgatgtgtgcattcaaatcacggagttgaatctttcttttgtcagagcagttttgaaacactgtttctgtggaatctgccagcggacacttggagcgctttgagggctatggtggagaaggaaatatcttcccataaaaactagaaagaaatattctcagaatcttctttgtgatgtgggcattcaactaacacagttgaacatttcttttcacagaacagttttgaaacactcttttgaacaattgcaggtgaatctttggagcgctttgaagcctttgttggaaataggaatatattcacacacaaactagccagaagcattctcagaaacttctttgtgatgtgtgcgttgaacccagagagatgaacctttccttggatagagcagttttgaaacgtgtttttgtaagatctgcaagtggataattggcttcgctttgtgtcctttggtggaaacgggaatatcttctaataaaaactagacagaaatattctcacaatcgtctttgtgatgtgggcattcaactaacacagttgaacatttcttttcacagagcagttttgaaacactcttttgctagaatctgccagtggatacttggagcgctttgagggctattgtgccaatggagatatcttcccctaaaaactagacagaatcattctcagaaactgctttgtgatgtttgcattcaactcacagagttgaacctacctcttcatagagcagtttggaaaacctcttcttgtagaatctgcaagtggatattcggaccactttgagaccttcataggaaacagtaatatcttcacataaaaactagatagaagaattgtcagaaagttctttgtgatgtgtgaattcaactcacagagttgaaccttcctttaatagagtagttttgaaacactctttttctagaatctgccagtagatatttggagcgctttgaggccttcgttggaaaccggaatatcttcacataaaaagtagatagaggcattctcagaaactttttcgtgttatgtggattcaactcacagcgttgaacctttcttttgatagagcagttttgtaaaactcttttatcgaatctgcaagtagacatttggagtgctttgagggctgtggtgcaaaaggaaatgtcttcccatagaaactagactgaagcattctcagcaacttcttggtgacgtttgcattcatctcacagtgttgaacatacgtttccatagagtggttttgaaacactgtttttgtagaatcggcaagtggatatttggactgctttcaggccttcatcggaaacgggaatattcttcacataaacactagagagaagcattctcagaaacttctttgtgatctgtccattcaactcacagagttgaaccttcctttttatggagcagttttgaaacactgtttttggagaatctgcaagtggatatttggagcgctttgaggcctatggtagaaaaataaatatctgcctctaaaaactagacagaagcattctgagaaacttctttgtgatgtttgcattcaactaccagggttgaaccttgcttttgataggtcagttttgaaacactctttttgtagaatctgcatgtggatatctggagcgatttgaggcctacggtccaaaaggaaatatcttcctgggaaaaatagacgaaagcattctcagaaactgctttgtgatatgtgcattcgactctccgagttgaaactttttttggatagagcagttttgaaacactctgtagaatctgaaagtggatatttggagctctttgagggctatggcggaaaagaaaagatattcacattaaactagacagcagcattctcagaaacttctttaggatgtttgcagtaaactcacagagttgaacatacctttccgtagagcagttttgaaacactctgtttgtgggatccgcaagtggatatttggaccgctttgagacctttgctggaaatgggaatatcttcacgtataaaatagacagaagcattctcagaaacttcttcgtgatgtgtgcattctcctcccgaatttgaatcttctttttcatgaagcagttttgaaacactctgtttgtgcaatccacaattggataattggaacgctttgatgcccatggtagaaaaggaaatatcctcatataaaaactagacagaaggattcacagaaaatgctttgtgaagtgtgcattcaaatcacggagttgaatctttcttttgttagagcagttttgaaacactgtttctgtggaatctgccagcggacacttggagcgctttgagggctgtggtggagaaggaaatatcttcccataaaaactagaaagaagcattctcagaaccatttatgtgaagcgtgcattcaactcacagagttgaaccttccttttgatagaacagttttgaaacactcttttgtacaattgcaggtgaatatttggagggctttgaagcctttgttggaaatgggaatatcttcacacacaaagtagccagaagcattctcagaaacttctttgtgatgtgtgcgttgaacccagagagatgaacctttcctttgatagagcagttttgaaacgtgtttttgtaagatctgcaaggggataatgggcttcgctttgtgtcctttggtggaaacgggaatatcttctaataaaaactagacagaagcattctcagaaacttctttgtgatgtgtccattcaactcacagagttgaaccttcctttttatggagccgttttgaaacactgtttttgtagaatctgcaagtggatatttggagcgctttgaagcctatggtagagaaagaaatatctgcatatcaaaactagacagaagcattctcagaaactgctttgtgatgtttgcattcaactaccagagttgaacttccctcttcatagagcagttttgaaatcctctttttgtagaatctgcaagtggatatttggaccactttgaggccttcagaagaaatagtaatatcttcacataaaaactagatagtagcattctcagaaacttctttgtgatgtgtgaattcaactcacagagtagaaccttccttcaatagagcagttttcaaacactcttttggtagaatctgcaagtagatatttggagcactttgaggccttcattggaaactggaatatcttcacataaaaagtagatagaggcatgctcagaaacttttttgtcatatgtagattcaactcacagcgttgaacctttcttttgatagagcagtttcgaaaaactcttttatcgaatctgcaagtagacatttggagtgctttgagggctctggtgcaaaaggaaatgtcttcccatagaaactagactgaagcattctcagcaacttctttgtgacgtttgcattcatctcacagtgttgaacatacctttccatagagaagttttgaaacactaattttgtagaatctgcaagtggatatttggactgctttgaggccttcatcggaaacgggaatatcttcacataaacactagacagaagcattctcagaaactactttgtgatctgtccattcaactcacagagttgaaccttcctttttatggagcagttttgaaacactgtttttggagaatctgcaagtggatatttagagcgctttgaggcctatggtagaaaaagaaatatctgcctctaaaaactagacagaagcattccgagaaacttctttgtgatgtttgcattcaactagcagagttgaaccttccttttgatagggcagtttggaaacactctttttgtagaacccgcatgtggatatctggagcggtttgaggcctacggtcaaaaaggaaatatcttcctgggaaaaatagacgaaagcattctcagaaagtgctttgtgatatgtgcattcgactcaccgagttgaaacttttttttgatagagcagttttgaaacactctgcagaatctgaaagtggatatttggagctctttgagggctatggcggaaaagaaattatattcacattaaagtagacagcagcatgcccagaaacttctttaggatgtttgcagtaaactcacagagttgaacatacctttccgtagagcagttttgaaacactctgtttgtgggatccgcaagtggatatttggaccgctttgagacctttgctggaaacgggaatatcttcacatataaactagacagaagcattctcagaaacttcctcgtgatgtgtgcattctactcccgaatttgaatcttccttttcatgaagcagttttcaaacactctgtttgtgcaatccacaattggataattggaacgctttgatgcccatggtagaaaaggaaatatcctcatataaaaactagacagaaggattcacagaaaatgctttgtgatgtgtgctttcaaatcacggagttgaatctttcttttgtcagagcagttttgaaacactgtttctgtggaatctgccagcggacacttggagcgctttgagggctgtggtggagaaggaaatatcttcccataaaaactagaaagagaagcattctcagaaacatttatgtgaagcgtgcattcaactcacagagttgaaccttcctttggatacaacagttttgaaacactcttttgaacaattgcaggtgaatctttggagcgctttgaagcctttgttggaaatgggaatatcttcacacacaaactaaccagaagcattctcagaaacttctttgtgatgtgtgcgttgaacccagagagatgaacctttccgttgatagagcagttttgaaacgtgtttttgtaagatcggcaagcggataattggcttcgctttgtgtcctttggtggaaacgggaatatcttctaataaaaactagacagaaatattctcagaatctcctttgtgatgtgggcattcaactaacacagttgaacatttcttttcacagagcagttttgaaacacacttttggtcgaatctgccagtggatatttggagcgctttgagggctgttgtgccaatggaaatatctgcccctaaaatctagacagaagcattctcagaaactacttcgtgatgtttgcattcaactcagagagttgaacatacctcttcacagagcacttttgaaaacctctttttgtagaatctgcaagtggatattcggagcactttgaggccttcataggaaacagtaatatcttcgcataaaaactagatagaagcattgtcagaaagttctttgtgatgtgtgaattcaactcacagagttgaaccttcctttaatagagcagttttgaaacactctttttcgagaatctgccagtagatatttggagcgctttgaggccttcgttggaaaccggaatatcttcacataaaaagtagatagaggcattctcagaaacttttttgtgatatgtagattcaactcacagcgttgaatctttctttggatggagcagttttgaaaaactcttttatcgaatctgcaggtagacatttggggtgctttgcgggctctggtgcaaaaggaaaagtcttcccatagaaactagactgaagcattctcagcaacttctttgtgacgtttgcattcatctcacagtgttgaacatacctttccatcgagtacttttgaaacactgtttttgtagaatctgcaagtggatatgtggactgctttgaggccttcatcggaaacgggaatatcttcacataaacactagagagaagcattctcagaaacttctttgtggtctgtccattcaaatcacagagttgaaccttcctttttatggagcagttttgaaacactgtttttggagaatctgcaagtggatatttggagcgctttgaggcctatggtagaaaaagaaatatctgcctatgacaaatagacagaagcattctgagaaacttctttgtgatgtttgcattcaactaccagagttgaaccttccttttgatagggcagtttggaaacactctttttgtagaatctgcatgtggatatctggagtgatttgaggcctacggtccaaaaggaaatatcttcctgggaaaaaaagacgaaagaattctcagaaactgctttgtgatatgtgcattcgactcaccgagttgaaacttttttttgatagagcagttttgaaacactctgtagaatctgaaagtggatatttggagctctttgagggctatggcggaaaagaaaatatattcacattaaactagacagcagcattcccagaaacttctttaggatgtttgcagtaaactcacagagttgaacatacctttccgtagagcagttttgaaacactctgtttgtgggatccgcaagtggatatttggaccgctttgagacctttgctggaaacgggaatatcttcacatataaactagatagaagcattctcagaaacgtcttcgtgatgtgtgcattgtactcccaaatttgaatcttccttctcatggagcagttttgaaacactctgtttgtgcaatctacaattggagaattggaaggcttagatgaccgtggtagaaaaggaaatatcctcatataaaaactagacagaaggattcacagaaaatgctttgtgatgtgtgcattcaaatcacggagttgaatctttcttttgttagagcagttttgaaacactgtttctgtggaatctgccagcggacacttggagcgctttgagggttatggtggagaaggaaatatcttcacataaaaactagaaagaaagcattctcagtaaacatttatgtgaagcgtgcattcaactcacagagttgaaccttcctttggatacaacagttttgaaacactcttttgaacaattgcaggtgaatctttggagcgctttgaagcctttgttggaaatgggaatatcttcacacacaaactagccagaagcattctcagaaacttctttgtgatgtgtgcgttgaacccagagagatgaacctttccttggatagagcagttttgaaacgtgtttttgtaagatcggcaagcggataattggcttcgctttgtgtcctttggtggaaacgggaatatcttctaataaaaactagacagaaatattctcacaatcatctttgtaatgtgggcattcaactaacacagttgaacatttcttttcacagagcagttttgaaacactcttttcctagaatctgccagtggatacttggagcgctttgagggctattgtgccaatggagatatcttcccctaaaaactagacagaagcattctcagaaactgcttcgtgatgtttgcattcaactcacagggttgaacatacctctgcatagagcagttttgaaaacctctttttgtagaatctgccagtggatattcggaccactttgaggccttcataggaaacagtaatatcttcacataaaaactagatagaagcattgtcagaaagttctttgtgatgtgtgaattcaactcacagagttgaaccttcctttagtagagcagttttgaaacactctttttctagaatatgcaagtagatatttggagcgctttgaggccttcgttgaaaaccggaatatcttcacatagaaagtagatagaggcattctcagaaacttttttgtgatatgttgattcatctgacagcgttgaacctttcttttgatagagcagttttgaaaaactcttttgttgaatctgcaagtagacatttggagtgctttgagggctgtggtgccaaaggaaatgtcttcccatggaaactagactgaaagcattctcagcaacttctttgtgacgtttgcattgatctcacagtgttgaacatacctttgcatagagtagttttgaaacactatttttgtagaatctgcaagtggatatttggactgctttgaggcctccatcggaaacgggaatatcttcacataaacactggacagaagcattctcagaaacttctttgtgatctgtccattcaactcacagagttgaaccttcctttttatggagcagttttgaatcactgtgtttggagaatctgcaagtggatatttcgagcgctttgaggcctatggtagaaaaagaaatatctgcctctaaaaaccagacagaagcattccgagaaacttctttgtgatgtttgcattcaactagcagagttgaaccttccttttgatagggcagtttggaaacactctttttgtagaatctgcatgtggatatctggagcggtttgaggcctacggtcaaaaaggaaatatcttcctgggaaaaattgacgaaagcattctcagaaagtgctttgtgatatgtgcattcgactcaccgagttgaaacttttttttgatacagcagttttgaaacactctgtagaatctgaaagtggatatttggagctctttgagggctatggcggaaaagaaaatatattcacattaaagtagacagcagcattctcagaaacttctttaggatgtttgcagtaaactcacagagttgaacctacctttctgtagagcagttttgaaacactctgtttgtgggatccgcaaggggatatttggaccgctttgagacctttgctggaaatgggaatatcttcacatataaactagacagaagcattctcagaaacttcttcgtgttgtgtgcattctcctcccgaatttgaatcttccttttcatgaagcagttttgaaacactctgtttgtgcaatccacaattggataattggaacgctttgatgcccatggtagaaaaggaaatatcctcatataaaaactagacagaaggattcacagaaaatgctttgtgatgtgtgcattcaaatcacggagttgaatctttcttttgtcagagcagttttgaaacactgtttctgtggaatctgccaggggacacttggagcgctttgagggctatggtggagaaggaaatatcttcccataaaaactagagagaagcattctcagaaacatttatgtgaagcgtgcattcaactcacagagttgaaccttccttttgatagaacagttttgaaacactcttttgaacaattgcaggtgaatctttggagcgctttgaagcctttgttggaattgggaatatcttcacacacaaactagccagaagcattctcagaaacttctttgtgatgcgtgcgttgaacccagagagatgaacctttcctttgatagagcagttttgaaacgtgtttttgtaaggtctgcaagcggataatcggcttcgctttgtgtcctttggtggaaacgggaatatcttctaataaaaactagacagaaatattctcagaatctcctttgtgatgtgggcattcaactaacacagttgaacatttcttttcacagagcagttttgaaacactcttttggtagaatctgccagtggatatttggagcgcttggagggctactgtgccaatggaaatatctgcccctgaaaactagacagaagcattctcagaaactacttcgtgatgtttgcattcaacacacagagttgaacatacctcttcacagagcagttttgaaaacctctttctggagaatctgcaagtggatattcggaccactttgaggccttcataggaaacagtaatatcttcacataaaaactagatagaagcatggtcagaaagttctttgtgatgtgtgaattcaactcacagagttgaaccttcctttaatagagcagttttgaaacactctttttctagaatctgcaagtagatatttggagcgctttgaggccttcgttggaaaccggaatatcttcacaggaaaagtagatagaggcattctcagaagcttttttgtgatatgtagattcaactcacagtgttgaacctttctttggatggagcagttttgaaaaactcttttatcgaatctgcaggtagacattcggggtgctttgagggctgtggtgcaaaaggaaatgtcttcccatagaaactagactgaagcattctcagcaacttcttggtgacgtttgcattcatctcacagtgttgaacatacctttccatagagtggttttgaaacactgtttttgtagaatcggcaagtggatatttggactgctttgaggccttcatcggaaacgggaatatcttcaaataaacactagagagaagcattctcagaaacttctttgtggtctgtccattcaactcacagagttgaaccttcctttttatggagcagttttgaaacactgttttcggaggatctgcaagtggatatttggagcactttgaggcctatggtagaaaaagaaatatctgcctatgacaactagacagaagcattccgagaaacttctctgtgatgtttgaattcaagtagcagagttgaaccttccttttgatagggtagtttggaaacactctttttgtagaatctgcatgtggatatctggagcggtttgaggcctacggtcaaaaaggaaatatcttcctgggaaaaatagacgaaagaattctcagaaactgctttgtgatatgtgcattcgactcaccgagttgaaactttttttttgatagagcagttttgaaacactctgtagaatctgaaagtggatatttggagctctttgagggctatggcggaaaagaaaatatattcacattaaactagacagcagcattcccagaaacttctttaggatgtttgcagtaaactcacagagttgaacatacctttccgtagagcagtattgaaacactctgtttgtgggatccgcaagtggatatttggaccgctttgagacctttgctggaaacgggaatatcttcacatataaactagacagaagcattctcagaaacttcttcgtgatgtgtgcattctcctcgcgaatttgaatcttccttttcatgaagcagttttgaaacactctgtttgtgcaatccacaattggataattggaacgctttgatgcccatggtagaaaaggaagtatcctcatataaaaactagacagaaggattcacagaaaatgctttgtgttgtgtgcattcaaatcacggagttgaatctttcttttgtcagagcagttttgaaacactgtttctgtggaatctgccagcggacacttggagcgctttgagggctatggtggagaaggaaatatcttcccataaaaactagaaagaagcattctcggaatcatttatgtgaagcgtgccttcaactcacagagttgaaccttccttttgatagaacagttttgaaacactcttttgaacaattgcaggtgaatctttggagcgctttgaagcctttgttggaaatgggaatatcttcacacacaaactagccagaagcattctcagaaacttctttgtgatgtgtgcgttgaacccagagagatgaacctttcctttgatagagcagttttgaaacgtgtttttgtaagatgctgcaagcggataattggcttcgctttgtgtcctttggtggaaacgggaatatcttctaataaaaactagacagaaatattctcagaatcttctttgtgatgtgggcattcaacaaacacagttgaacatttcttttcacagagcagttttgaaacactcttttggtagaatctgccagtggatatttggagcgctttgagggctattgtgccaatggaaatatcttcccctaaaaactagacagaagcattctcagaaactacttcgtgatgtctgcattcaacacacagagttgaacatacctcttcagagagcagttttgaaaacctctttctgtagaatctgcaagtggatattcgggccactttgaggccttcataggaaacagtaatatcttcacataaaaactagatagaagcattgtcagaaagttctttgtgatgtgtgaattcaactcacagagttgaaccttccttcaatagagcagttttgaaacactctttttctagaatctgcaagtagatatttcgagcgctttgaggccttcgttggaaaccggaatatcttcacaggaaaagtagatagaggcattctcagaaacatttttgtgatatgtagattcaactcacagcgttgaacctttctttggatggagcagttttgaaaaactcttttatcgaatctgcaggtagacatttggggtgctttgagggctgtggtgcaaaaggaaatgtcttcccatagaaactagactgaatcattctcagcaacttcttggtgacgtttgcattcatctcacagtgttgaacatacctttgcatagagtagtttcgaaacactatttttgtagaatctgcaagtggacatttggactgctttgaggccttcatcggaaacgggaatatcttcacataaacactagacagaagcattctcagaaacttctttgtggtctgtccattcaactcacagagttgaaccttcctttttatggagcagttttgaaacactgtttttggaggatctgcaagtggatatttggagcgctttgaggcccatcgtagaaaaagaaatatctgcctatgacaactagacagaagcattctgagtaaacttctttgtgatgtttgcattcaactaccagagttgaatcttccttttgatagggcagtttggaaacactctttttgtagaatctgcatgtggatatctggagcgatttgaggcctacggtccaaaaggaaatatcttcctgggaaaaatagaggaaagcattctcagaaagtgctttgtgatatgtgcattcgactcaccgatttgaaacctttttttgatagagcagttttaaaacacactgtagaatctgaaagtggatatttggagctctttgagggctatggcggaaaagaaaatatattcacattaaagtagacagcagcattcccagaaacttctttaggatgtttgcagtaaactcacagagttgaacatacctttccgtagagcagctttgaaacactctgtttgtgggatccgcaagtggatatttggaccgctttgagacctttgctggaaacgggaatatcttcacatataaactggacagaagcattctcagaaacttcttcgtgatgtgtgcattctactcccgaatttgaatcttccttttcatgaagcagttttgaaacactctgtttgtgcaatccacaattggataattggaacgctttgatgtccatggtagaaaaggaaatatcctcatataaaaactagacagaaggattcacagaaaatgctttgtgatgtgtgcattcagatcacggagttgaatctttcttttgtgagagcagttttgaaacactgtttctgtgcaatctgccagcggacacttggagcgctttgagggctatggtggagaaggaaatatcttcacataaaaactagaaagaagcattctcagaaacatttatgtgaagcgtgccttcaactcacagagttgaaccttccttttgatacaacagttttgaaacactctttggaacaattgcaggtgaatctttggagcgctttgaagcctttgttggaaatgggaatatcttcacacacaaactagccagaagcattcccagaaacttctttgtgatgtgtgcgttgaacccagagagatgaacctttcctttgatagagcaggtttgaaacgtgtttttgtaagatctgcaagcggataattggctttgctttgtgtcccttggtgaaaacgggaatatcttctaataaaaactagacagaaatattctcacaatcatctttgtgatgtgggcattcaactaacacagttgaagatttcttttcacagagcagttttgaaacactcttttgctagaatctgccagtggatacttggagcgctttgagggatattgtgccaatggaaatatcttcccctaataactagacagaagcattctcagaaactacttcgtgatgtttgcattcaactcacagcgttgaacatacctcttcatagagcagttttgaaaacctctttctgtagaatctgcaagtggatattcggaccactttgaggccttcataggaaacagtaatatcttcacataaaaactagatagaagcattgtcagaaagttcttggtgatgtgtgaattaaactcacagagttgaaccttcctttaatagagcagttttgaaacactctttttctagaatctgcaagtagatatttggagcgctttgaggccttcgttggaaaccggaatatcttcacaggaaaagtagatagaggcattctcagaaacttttttgtgatatgtagattcaactcacagcgttgaacctttctttgcatggagcagttttgaaaaactcttttatcgaatctgcaggtagacatttggggtgctttgagggctctggtgcaaaaggaaaagtcttcccatagaaactagactgaagcattctcagcaacttcttggtgacgtttgcattcatctcacagtgttgaacatacctttccatagagtggttttgaaacactgtttttgtagaatcggcaagtggatatttggactgctttgaggccttcatcggaaacgggaatatcttcacataaacactacagagaagcattctcagaaacttctttgtcatctgtccattcaactcacagagttgcaccttcttttttatggagcagttttgaaacactccttttggagaatctgcaagtggatatttggagcgctttgaggcctatggtagaaaaagaaatatctgcctctaaaaaccagacagaagcattccgagaaactcctttgtgatgtttgcattcaactagcagagttgaaccttccttttgatagggcagtttggaaacactctttttgtagaatctgcatgtggatatctggagcggtttgaggcctacggtcagaaaggaaatatcttcctgggaaaaatagacgaaagcattctcagaaagtgctttgtgatatgtgcattcgactcaccgagttgaaacttttttttgatagagcagttttgaaacactctgcagaatctgaaagtggatatttggagctctttgagggctatggcggaaaagaaaatatattcacagtaaagtagacagcagcattcccagaaacttctttaggatgtttgcagtaaactcacagagttgaacatacctttccgtagagcagctttgaaaaactctgtgtgtgggatccgcaagtggatatttggaccgctttgagacctttgctggaaacgggaatatcttcacatataaactggacagaagcattctcagaaaattcttcgtgatgtgtgcattgtactcccaaatttgaatcttccttctcatggagcagttttgaaacactctgtttgtgcaatctacaattggagaattggaacgcttggatgcccgtggtagaaaaggaaatatcctcatataaaaactagacagaaggattcacagaaaatgctttgtgatgtgtgcattcaaatcacggagttaaatctttcttttgttagagcagttttgaaacactgtttctgtggaatctgccagcggacccttggagcgctttgagggctacggtggagaaggaaatatcttcacataaaaactagaaagaagcattctcggaaacatttatgtgaagcgtgcattcaactcacagagttgaaccttccttttgatagaacagttttgaaacactcttttgaacaattgcaggtgaatctttggagcgctttgaagcctttgttggaaatgggaatatcttcacacacaaactagccagaagcattctcagaaacttctttgtaatgtgtgcgttgaacccagagagatgaacctttccttcgatagagcagttttgaaacgtgtttttgtaagatcggcaagcggataattggcttcgctttgtgtcctttggtggaaacgggaatatacttctaataaaaactagacagaaatattctcagaatctcctttgtgatgtgggcattcaactaacacagttgaacatttcttttcacagagcagttttgaaacactcttttggtagaatctgcatgtggatatttggagcgcttggagggctattgtgccaatggaaatatctgcccctgaaaactagacagaagcattctcagaaactgcttcaggatgtttgcattcaactcacagagttgaacatacctctgcatagagcagttttgaaaacctctttttgtagaatctgcaagtggatattcggaccactttgaggccttcatgggaaacagtaatatcttcacataaaaactagatagaagcattgtcagaaagttctttgtgatgtgtgaattcaactcacagagttgaaccttcctttaatagagcagtcttgaaacactctttttctagaatctgcaagtagatatttggagcgctttgaggccttcgttggaaaccggaatatcttcacataaaacgtagatagaggcattctcagaaactttttttgtgatatgtagattcaactcacagcgttgaacctttctttgggtggagcagttttgaaaacctcttttatcgaatctgcaggtagacatttggggtgctttgagggctgtggtgcaaaaggaaatgtcttcccatagaaactagactgaagcattctcagcaacttctttttgacgtttgcattcatctcacagtgttgaacatacctttccatagagtagttttgaagcactatttttgtagaatctgcaagtggatatttggactgctttgagaccttcatcggaaacgggaatatcttcacataaacactagacagaagcattctcggaaattactttgtggtctgtccattcaaatcacagagttgaaccttcctttttatggagcagttttgaaacactgttttcggagaatctgcaagtggatatttggagcgctttgaggcctatggtagaaaaagaaatatctgcctatgacaactagacagaagcattccgagaaacttctttgtgatgtttgcattcaactagcagagttgaacctttcttttgatagggcagtttggaaaaactctttttgtagaatctgcatgtggatatctggagcggtttgaggcctacagtcaaaaaggaaatatcttcctgggaaaaatagacgaaagcattctcagaaactgctttgtgatatgtgcattcgactcaccgagttgaaactttttttggatagagcagttttgaaacactctgtagaatctgaaagtggatatttggagctctttgagggctatggagaaaagaaaatatattcacattaaactagacagcagcattcccagaaacttctttaggatgtttgcagtaaactcacagagttgaacacacctttccgtagagcagttttgaaacactctgtttgtggaatccgcaagtggatatttggaccgctttgagacctttgctggaaacgggaatatcttcacatataaactggacagaagaattctcagaaacttcttcgtgatgtgtgcattctactcccaaatttgaatcttccttttcatgaagcagttttgaaacactctatttgtgcattctacaattggatgattggaacgctttgatgcccatggtgggaaaaggaaatatcctcatataaaaactagacagaaggattcacagaaaatgctttgtgatgtgtgcattcaaatcacggagttgaatctttcttttgttagagcagttttgaaacactgtttctgtggaatctgccagcggacacttggagcgctttgagggctgtggtggagaaggaaatatcttcccataaaaactagaaagtagcattctcggaaacatttatgtgaagcgtgcattcaactcacagagttgaaccttccttttgatagaagagttttgaaacactcttttgaacaattgcaggtgaatctttggagcgctttgaagcctttgttggaaatgggaatatcttcacacacaaactagccagaagcattctcagaaacttctttgtgatgtgtgcgttgaacccagagagatgaacctttcctttgatagagcagttttgaaacgtgtttttgtaagatcggcaagcggataactggcttcgctttgggtcctttggtggaaacgggaatatcttctaataaaaactagacaaaaatattctcagaatcttctttgtgatgtgggcattcaactaacacagttgaacgtttcttttcacagagcagttttgaaacactcttttggtagaatctgccagtggatatttggagcgctttgagggctattgtgccaatggaaatatctgcccttaaaactagacagaagcattctcagaaactgctttgtgatgtttgcattccactcacagagttgaacataccttttcatagagcagttttgaaaacctctttttgtagaatctgcaagtggatattcggaccagtttgaggccttcataggaatcagtaatatcttcacataaaaactagatagaagcattgtcagaaagttgttggtgatgtgtgaattcaactcacagagttgaaccttcctttaatagagcagttttgaaacactctttttctagaatctgcaagtagatatttggagcgctttgaggccttcgttggaaaccggaatatcttcacaggaaaagtagatagaggcattctcagaaaattttcgtgatatgtggattcaactcacagcgttgaacctttcttttgatagagcagttttgtaaaactcttttatcgaatctgcaagtagacatttggagtgctttgagggctgtggtgcaaaaggaaatgtcttcccatagaaactagactgaagcattctcagcaacttctttgtgacgtttgcattcatctcacagtgttgaacatacctttccatagagtagttttcaaacactatttttgtagaatctgcaagtggatatttggactgctttgaggccttcatcggaaacgggaatatcttcacatcaacactagagagaagcattctcagaaactactttgtgatctgtccattcaactcacagagttgaaccttcctttttatggagcagttttgaaacaatgtttttggagaatctgcaagtggatatttggagcgctttgaggcctatggtagaaaaagaaatatctgcctctaaaaactagacagaagcattctgagaaacttctttgtgatgtttgcattcaactagcagagttgaaccttccttttgatagggcagtttggaaacacccttttgtagaatctgcatgtggatatctggagcgatttgaggcctacggtcaaaaaggaaatatcttcctgggaaaaatagacgaaagcattctcagtaaactgctttgtgatatgtgcattcgactctccgagttgaaacttttttttgatagagcagttttgaaacactctgtagaatctgaaagtggatatttggagctcttcgagggctatggcggaaaagaaaatatattcacattaaactagacagcagcattctcagaaacctctttaggatgtttgcagtaaactcacagagttgaacatacctttccgtagagcagttttgaaacactctgtttgtgggatccgcaagtggatatttggaccgctttgagacctttgctggaaatgggaatatcttcacatataaactagacagaagcattctcagaaacttcttcatgatgtgtgcattctactcccaaatttgaatcttccttttcatgaagcagttttgaaacactctgtttgtgcaatccacaattggataattggaacgctttgatgcccatggtagaaaaggaaatatcctcatataaaaactagacagaaggattcacagaaaatgctttgtgatgtgtgcattcaaatcacggagttgaatctttcttttgtcagagcagttttgaaacactgtttctgtggaatctgccagcggacacttggagcgctttgagggctatggtggagaaggaaatgtcttcccataaaaactagaaagaagcattctcagaaacatttatgtgaagcgtgcattcaactcacagagttgaaccttccttttgatagaagagttttgaaacactcttttgaacaattgcaggtgaatatttggagcgctttgaagcctttgttggaaatgggaatatcttcacacacaaactagccagaagcattctcagaaacttctttgtgatgtgtgcattgaacccagagagatgaacctttcctttgatagagcagttttgaaacgtgtttttgtaagatctgcaagcggatagttggcttcgctttgtgtcctttggtggaaacgggaatatcttctaataaaaactagacagagatattctcagcaaacttctttgtgatgtgggcattcaactgacacagttgaacatttcttttcacagagcagttttgaaacactcttttggtcgaatctgccagtggatatttggagcgctttgagggctattgtgccaatggaaatatctgcccctaaaaactagacagaagcattctcagaaactacttcgtgatgtttgcattcaactcacagagttgaacatacctcttcacagagcagtattgaaaacctctttttgtagaatctgcaagtggatattcggagcactttgaggccttcataggaaacagtaatatcttcgcataaaaactagatagaagcattgtcagaaagttctttgtgatgtgtgaattcaactcacagagttgaaccttcctttaatagagcagttttgaaacactctttttctagaatctgcaagtagatatttggagcgcttggaggccttcgttggaaaccggaacatcttcacaggaaatgtagatagaggcattctcagaaactttttcgtgatatgtggattcaactcacagcgttgaacctttcttttgatagagcagttttgtaaaactcttttatcgaatctgcaagtagacatttggagtgcgttgaaggctgtggtgcaaaaggaaatgtcttcccatagaaactagactgaagcattctcagcaacttctttgtgacgtttgccttcatctcacagtgttgagcatacctttccatagagttgttttgaagcactatttttgtagaatctgcaagtggatatttggactactttgaggccttcatcggaaacgggaatatcttcacataaacactagacagaagcattctcagaaacttctttgtcatctgtccattcaactcacagagttgaaccttcctttttatggagcagttttgaatcactgtttttggggaatctgcaagtggatatttcgagcgctttgaggcctatggtagaaaaagaaatatctgcctctaaaaaccagacagaagcattctgagaaacttctttgtgatgtttgcattcaactagcagagttgaaccttccttttgatagggcagtttggaaacactctttttgtagaatctgcatgtggttatctggagcggttttaggcctacggtcaaaaaggaaatatcttcctgggaaaaatagacgaaagcattctcagaaactgctttgtgatatgtgcattcgactcaccgagttgaaactttgttttgatagagcagttttgaaacactctgtagaatctgaaagtggatatttggagctctttgagggctatggcggaaaagaaaatatattcacattaaactagacagcagcattcccagaaacttctttaggatgtttgcagtaaactcacagtagttgaacatacctttccgtagagcagttttgaaacactctgtttgtgggatccgcaagtggatatttggaccgctttgagacctttgctggaaacgggaatatcttcacatataaactagacagaaacattctcagaaacttcttcgtgatgtgtgcattctactcccgaatttgaatcttccttttcatgaagcagtttagaaacactctgtttgtgcaatccacaattggataattggaacgctttgatgcccatggtagaaaaggaaatatcctcatataaaaactagacagaaggattcacagaaaatgctttgtgatgtgtgcattcaaatcacggagttgaatctttcttttgttagagcagttttgaaacactgtttctgtggaatctgccagcggacacttggagcactttgagggctatggtggagaaggaaatatcttcccataaaaactagaaagaagcattctcagaaccatttatgtgaagcgtgcgttcaactcacagagttgaaccttccttttgatagaacagttttgaaacactcttttgaacaattgcaggtgaatatttggagggctttgaagcctttgttggaaatgggaatatcttcacacacaaactagacagaagcattctcagaaacttctttgtgatgtgtgcgttgaacccagggagatgaacctttcctttgatagagcagttttgaaacgtgtttttgtaagatctgcaagcggataatttgtctcgctttgtgtcctttggtggaaacgggaatatcttctaataaaaactagacagaaatattctcagaatcttctttgtgatgtgggcattcaactaacacagttgaacctttcttttcacagagcagtttggaaacacccttttggtagaatctgccagtggatatttggagcgctttgagggctattgtgccaacggaaatatctgcccctaaaaactagacagaagcatgctcagaaactgctttgtgatgttggcattcaactcacagagttgaacatacctcttcatagagcagttttgaaaacctctttttgtagaatctgcaagtggatattcggaccactttgaggccttcataggaaacagtaatatcttcacataaaaactagatagaagcattgtcagaaagttctttgtgatgtgtgaattcaactcacagagttgaaccttcctttaatagagcagttttgaaacactcttcttctagaatctgtaagtagatatttggagcgctttgaggccttcgttggaaaccgaaatatcttcacagaaaaagtagatagaggcattctcagaaacttttttgtgatatgttgattccactcacagcgttgaacctttcttttgatagagcagttttgaaaaactcttttatcgaatctgcaggtagacatttggtgtgctttgagggctgtggtgcaaaaggaaatgtcttcccatagaaactagactgaaacattctcagcaacttctttgtgacgtttgcattcatctcacagcgttgaacatacctttccaaagagtagttttgaaacactatttttgtagaatctgcaagtggatatttggactgctttgaggccttcatcggaaacgggaatatcttcacataaacactagagagaagcattctcagaaacttctttgtgatctgtccattcaactcacagagttgaaccttcctttttatggaacagttttgaaacactccttttggagaatctgcaagtggatatttggagcgctttgaggcctatggtagaaaaagaaatatctgcctctaaaaaccagacagaagcattccgagaaacttctttgtgatgtttgcattcaactagcagagttgaaccttccttttcatagggcagtttggaaacactctttttgtagaatctgcatgtggatatctggagcggtttgaggcctacggtcaaaaaggaaatatcttcctgggaaaaatagacgaaagcattctcagaaactgctttgtgatatgggcattcgactcaccgagttgaaacttttttttgatagagcagttttgaaacactctgtagagatctgaaagtggatatttggagctctttgagggctatggcggaaaagaaaatatattcacattaaactagagaggagcattcccagaaacttctttaggatgtttgcagtaaactcacagagttgaacatacctttccgtagagcagttttgaaacactctgtttgtgggatccgcaagtgtatatttggaccgctttgagacctttgctggaaacgggaatatcttcacatataaactagacagaagcattctcagaaacttcttcgtgatgtgtgcattctcctcgcgaatttgaatcttccttttcatgaagcagttttgaaacactctgtttgtgcaatccacaattggataattggaacgctttgatgcccatggtagaaaaggaaatatcctcatataaaaactagacagaaggattcacagaaaatgctttgtgatgtgtgcattcaaatcacggagttgaatctttcttttgttagagcagttttgaaacactgtttctgtggaatctgccagcggacacttggagcactttgagggctgtggtggagaaggaaatatcttcccataaaaactagaaagaagcattctcagaaacatttatgtgaagcgtgcattcaactcacagagttgaaccttccttttgatacaacagttttgaaacacccttttgaacaattgcaggtgaatctatggagcgctttgaagcctttgttggaaatgggaatatcttcacacacaaactagccagaagcattctcagaaacttctttgtgatgtgtgcgttgaacccagagaggtgaacctttcctttgatagagcagttttgaaacgtgttttggtaagatctgcaaacggataattgacttcgctttgtgtattttggtggaaacgggaatatcttctaataaaaactagacagaaatattctcagaatctcctttgtgatgtgggcattcaactaacacagttgaacatttcttttcacagagcagttttgtaacacacttttggtagaatctgccagtggatattttgagcgctttgagggctgttgtgccaatggaaatatctgcccctaaaatctagacagaagcattctcagaaactgcttcgggatgtttgcattcaactcacagagttgaacatacctctgcatagagcagttttgaaaacctctttttgtagaatctgcaagtggatattcggaccactttgaggccttcatgggaaacagtaatatcttaacataaaaactagatagaagcattgtcagaaagttctttgtgatgtgtgaattcaactcacagagttgaaccttccttcaatagagcagttttgaaacactctttttctagaatctgcaagtagatatttggagtgcttggaggccttcgttggaaaccggaatatcttcacaggaaaagtagatagaggcattgtcagaaacttttttgtgatatgtagattcaactcacagcgttgaacctttctttggatggagcagttttgaaaaacccttttatcgaatctgcaggtagacattcggggtgctttgagggctgtggtgcaaaaggaaatgtcttcccatagaaactagactgaagcattctcagcaacttctttgtgatgtttgcattcatctcacagtgttgaacatacctttgcatagagtagttttgaaacactatttttgtagaatctgcaagtggatatttggactgctttgaggccttcatcggaaacgggaatatcttcacataaacactggacagaagcattctcagaaacttctttgtgatctgtccgttcaacacacagagttgaaccttcctttttatggagcagttttgaaacactgtttgtggagaatctgcaagtggatatttggagcgccttgaggccaatggtagaaaaagaaatatctgcctctaaatactagactgaagcattctgagaaacttctttgtgatgtttgccttcaactaccagagttgaaccttccttttgatagggcagtttggaaacactctttttgtagaatctgcatgtggatatctggagcgatttgaggcctacggtccaaaaggaaatatcttcctgtgaaagatagacgaaagcattctcagaaagtactttgtgatatgcgcattcgactcaccgagttgaaacttttttttgatagagcagttttgaaacactctgtagaatctgaaagtggatatttggagctctttgagggctatggcggaaaagaaaatatattcacattaaagtagacagcagcattctcagaaacttctttaggatgtttgcagtaaactcacagagttgaacatacctttccgtagagcagttttgaaacactctgtttgtgggatccgcaagtggatatttggaccgctttgagacctttgctggaaatggggatatcttcacgtataaactagacagaagcattctcagaaacttcttcgtgatgtgtgcattgtactcccaaatttgaatcttccttctcatggagcagttttgaaacactctgtttgtgcaatctacaattggagaattggaacgcttggatgaccgtggtagaaaaggaaatatcctcatataaaaactagacagaaggattcacagaaaatgctttgtgatgtgtacattcaaatcacggagttgaatctttcttttgtcagagcagttttgaaacactgtttctgtggaatctgccagcggacacttggagcgctttgagggctatggtggagaaggaaatatcttcccataaaaactagagagaagcattctcagaaacatttatgtgaagcttgcattcaactcacagagttgaaccttccctttgatacaacagttttgaaacacccttttgaacaattgcaggtgaatctttggagcgctttgaagcctttgttggaaatgggaatatcttcacacacaaactagccagaagcattctcagaaacttctttgtgatgtgtgcgttgaacccagagagatgaacctttcctttgatagagcagttttgaaacgtgtttttgtaaggtcggcaagtggataattggcttcgctttgtgtcctttggtggaaacgggaatatcttctaataaaaactagacagaaatattctcagaatctcctttgtgatgtgggcattcaactaacacagttgaacatttcttttcacagagcagttttgaaacactcttttggtcgaatctgccagtggatatttggagcgcttggagggctattgtgccaatggaaatatctgcccccgaaaactagacagaagcattctcagaaactgcttcgtgatgtttgcattcaactcacagggttgaacatacctctgcatagagcagttttgaaaacctctttttgtagaatctgcaagtggatattcggaccactttgaggccttcataggaaacagtaatatcttcacataaaaactagacagaagcattgtcagaaagttctttgtgatgtgtgaattcaactcacagagttgaaccttcctttaatagagcagttttgaaacactctttttctagaatctgccagtagatatttggagcgctttgaggccttcgttggaaaccagaatatcttcacataaaaagtagatagatgcattctcagaaactttttcgtgatatgtagattcaactcacagcgttgagcctttcttttgatagagcagtttcgtaaaactcttttatcgaatctgcaggtagacatttggagtgctttgagggctgtggtgcaaaaggaaatgtcttcccatagaaactagactgaagcattctcagcaacttcttggtgacgtttgcattcatctcacagtgttgaacatacctttccctagagtggttttaaaacactgtttttgtagaatcggcaagtggatatttggactgctttgaggccttcatcggaaaagggaatatcttcacataaacactagagagaagcattctcagaaacttctttgtcatctgtccattcaactcacagagttgaaccttcctttttatggagcagttttgaaacactccttttggagaatctgcaggtggatatttggagtgctttgaggcctatggtagaaaaagaaatatctgcctctaaaaaaaagacagaagcattccgagaaacttctttgtgatgtttgcattcaactcgcagagttgaaccttccttttgatagggcagtttggaaacactctttttgtagaatctgcatgtggatatctggagcggtttgaggcctacggtcaaaaaggaaatatcttcctgggaaaaatagacgaaagcattctcagaaagtgctttgtgatatgcgcattcgactcaccgagttgaaacttttttttgatacagcagttttgaaacactctgtagaatctgaaagtggatatttggagctctttgagggctatggcggaaaagaaaatatattcacgttaaaaaagtagacagcagcattcccagaaacttctttaggatgtttgctgtaaactcacagagttgaacatacctttccgtagagcagttttgaaacactctgtttgtgggatccgcaagtggatatttggaccgctttgagacctttgctggaaacgggaatatcttcacatataaactagacagaagcattctcagaaacttcttcgtgatgtgtgcattctactcccaaatttgaatcttccttctcatgaagcagttttataactctctatttgtgcaatttacaattggataattggaaccctttgatgcccatggtagaaaaggaaatatcctcatataaaaactagacagaaggattcacagaaaatgctttgtgatgtgtgcattcaaatcacggagttgaatctttcttttgttagagcagttttgaaacactgcttctgtggaatctgccagcggacacttggagcgctttgagggctatggtggagaaggaaatatcttcacataaaaactagaaagaagcattctcagaaccatttatgtgaagcgtgcattcaactcacagagttgaaccttccttttgatagaacagttttgaaacactcttttgaacaattgcaggtgaatatttggagggctttgaagcctttgttggaaatgggaatatcttcacacacaaactagccagaagcattctcagaaacttctttgtgatgtgtgcgttgaacccagagagatgaacctttcctttgataaagcagttttgaaacgcgtttttgtaagatcggcaagcggataattggcttcgctttgtgtcctttggtggaaacgggaatatcttctaataaaaactagacagagatattctcagaaatttctttgtgatgtgggcattcatctaacacagtcgaagatttcttttcacagagcagttttgaaatactcttttggtcgaatctgccagtggatatttggagcgctttgagggctattgtgccaatggaaatatctgcccctaaaaactagacagaagcattctcagaaactacttcatgatgtttgcattcaactcagagagttgaacatacctcttcacagagcagttttgaaaacctctttttgtagaatctgcaagtggatattcggagcactttgaggccttcataggaaacagtaatatacttcgcataaaaactagatagaagtattgtcagaaagttctttgtgatgtgtgaattcaactcacagagttgaaccttccttcaatagagcagttgtgaaacactctttttctagaatctgcaagtagatacttggagcgctttgaggccttcgttggaaaccggaatatcttcacaggaaaagtagatagaggcattctcagaaacttttttgtgatatgtagattcaactcacagcgttgaacctttctttggatggagcagttttgaaaaactcttttatcgaatctgcaggtagacattcggcgtgctttgagggctgtggtgcaaaaggaaatgtcttcccatagaaactagactgaagcattctcagcaacttcttggtgacgtttgcatttatctcacagtgttgaacatacctttccatagagtggttttgaaacactgtttttgtagaatcggcaattggatatttggactgctttgaggccttcatcggaaacgggaatatcttcacataaacactagagagaagcattctcagaaacttctttgtgatctgtccattcaactcacagagttgaaccttcctttttatggagcagttttgaaacactccttttggagaatctgcaagtggatatttggagcgctttgaggcctatggtagaaaaagaaatatctgcctctaaaaaccagacagaagcattctgagaaacttctttgtgatgtttggcattcaactaccagagttgaaccttccttttgatagggcagtttggaaacactctttttgtagaatctgcatgtggatatctggagcgatttgaggcctacggtccaaaaggaaatatcttcctgggaaaaatagacgaaagcattctcagaaagtgctttgtgatatgtgcattcgactcaccgagttgaaacttttttttgatagagcagttttgaaacactctgtagaatctgaaagtggatagttggagctctttgagggctatggcggaaaagaaaatatattcacattaaagtagacagcagcattctcagaaacttctttaggatgtttgcagtaaactcacagagttgaacctacctttccgtagagcagttttgaaacactctgtttgtgggatccgcaaggggatatttggaccgctttgagacctttgctggaaatgggaatatcttcacatataaactagacagaagcattctcagaagcttcttcgtgatgtgtgcattctactcccaaatttgaatcttccttttcatgaagcagttttgaaacactctgtttgtgcaatccacaattggataattggaacgctttgatgcccatggtagaaaaggaaatatcctcatataaaaactagacagaaggattcacagaaaatgctttgtgatgtgtgcattcaaatcacgcagttgaatctttcttttgttagagcagttttgaaacactgtttctgtggaatctgccagcggacacttggagcgctttgagggctatggtggagaaggaaatatcttcacataaaaactagaaagaaagcattctcagaaccatttatgtgaagcgtgcattcaactctcagtagttgaaccttccttttgttagaacagttttgaaacactcttttgaacaattgcaggtgaatatttggagcgctttgaagcctttgctggaaatgggaatatcttcacgcacaaagtagccagagcattctcagaaacttctttgtgatgtgtgcgttgaacccagagagatgaacctttcctttgatagagcagttttgaaacgtgtttttgtaagatctgcaagcggataattggcttctctttgtgtcctttggtggaaacgggaatatcttctaataaaaactagacagaaatattctcagaatctcctttgtgatgtgggcattcaactaacacagttgaacatttcttttcacagagcagttttgaaacacccttttggtagaatctgccagtggatatttggagcgcttggagggctattgtgccaatggaaatatctgcccctgaaaactagacagaagcattctcagaaactgcttcgtgatgtttgcattcaactcacagacttgaacatacctctgcatagagcacttttggaaacctctttttgtagaatctgcaagtggatattcggaacactctgaggccttcataggaaacagtaatatcttcacataaaaactagataaaagcattgtcagaaagttctttgtgatgtgtgaattcaactcacagagttgaaccttcctttaatagagcagttttgaaacactctttttctagaatctgcaagtagatatttggagcgctttgaggccttcgttggaaaccagaatatcttcacaggaaaagtagatagaggcattctcagaaaacttttttgtgatatgtagattcaactcacagcgttgaacctttctttggatggagcagttttgaaaaactcttttatcgaatctgcaggtagacattcggggtgctttgagggctgtggtgcaaaaggaaatgtcttcccatagaaactagactgaagcattctcagcaacttctttgtgatgtttgcattcatctcacagtgttgaacatacctttccatagggtagctttgaagcactatttttgtagaatctgcaagtggatatttggactgctttgaggccttcatcggaaacgggaatatcttcacataaacactagacagaagcattctcagaaacttctttgtcatctgtccattcaactcacagagttgaaccttccttattctggagcagttttgaaacactctttttggagaatctgcaagtggatatttggagcgctttgaggcctatggtagaaaaagaaatatctgcccctaaacaccagacagaagcattctgagaaacttctttgtgatgtttgcattcaactaccagatttgaaccttccttttgatagggcagtttggaaacactctttttgtagaatctgcatgtggacatctggagcgatttgaggcctacggtcaaaaaggaaatatcttcctgggaaaaatagacgaaagcattctcagaaagtgctgtgtgatatgtgcattcgactccccgagttgaaacttttttttgatagagcagttttgaaacactctgtagaatctgaaagtggatatttggagctctttgagggctatggcggaaaagaaaatatattcacattaaagtagacagcagcattcccagaaacttctttaggatgtttttcaagttaaactcacagagttgaacatacctttccgtagagcagttttgaaacactctgtttgtgggatccgcaagtggatatttggacccctttgagacctttgctggaaacgggaatatcttcacatataaactagacagaagcattctcagtaaacttcttcgtgatgtgtgcattctactcccgaatttgaatcttccttttcatgaagcagttttgaaacactctgtttgtgcaatccacaattggataaatggaacgctttgatgcccatggtagaaaaggaaatatcctcatataaaaactagacagaaggattcacagaaaatgctttgtgatgtgtgcattcaaatcacggagttgaatctttcttttgtgagagcagttttgaaacactgtttctttggaatctgccagcggactcttggagctctttgagggctatggtggagaaggaaatatcttcccataaaaactagaaagaagcattctcagaaccatttatgtgaagcgtgcgttcaactcacagagttgaaccttccttttgatagaacagttttgaaacactcttttgaacaattgcaggtgaatatttggagggctttgaagcctttgttggaaatgggaatatcttcacacacgaactagccagaagcattctcagaaacttctttgtgatgtgtgcgttgaacccagagagatgaacctttcctttgatagagcagttttgaaacgtgtttttgtaaggtctgcaagcggataatgggcttcgctttgtgtcctttggtggaaacgggaatatcttctaataaaaactagacagaaatattctcacaatcatctttgtgatgtgggcattcaactaacacagttgaacatttcttttcacagagcagttttgaaacactcttttgctagaatctgccagtggatacttggagcgctttgagggctattgtgccaatggagatatcttcccctaaaaactagacagaagcattctcagaaactactttgtgatgtttgcattcaactcacagagttgaacatacctcttcatagagcagttttgaaatcctctttttgtagaatctgcaagtggatattcagaccactttaaggccttcataggaaacagtaataccttcacgtaaaaactagatagaagcattgtcagaaagttctttgtgatgtgtgaattcaactcacagagttgaaccttcctttaatagagcagttttgaaacactcttcttctagaatctgcaagtagatatttggagcgctttgaggcctttgttggaaaccggaatatcttcacagaaaaagtagatagaggcattctcagaaacttttttgtgatatgtagattcaactcacaacgttgaacctttcttttgatagagcagttttgaaaaactcttttatcgaatctgcccgtagaccttttgagtgctttgagggctgtggtgcaaaaggaaatgtcttcccatagaaactagactgaagcattgtcagcaacttcttggtgacgtttgcattcatctcacagcgttgaacatacctttccatagagtggttttgaaacactgtttttgtagaatcggcaagtggatatttggactgctttgaggccttcatcggaaacgggaatatcttcacataaacactagagagaagcattctcagaaacttctttgtgatctgtccattcaactcacagagttgaaccttcctttttatggagcagttttgaaacactgttcttggagaatctgcacgtggatatttggagcgctttgaggcctgtggtagaaaaagaaatatctgcctctaaaaactagacagaagcattctgagaaacttctttgtgatgtttgcattcaagtaccagagttgaaccttccttttgatagggcagtttggaaacactctttttgtagaatctgcatgtggatatctggagcgatttgaggcctacggtcaaaaaggaaatatcttcctgggaaaaatagacgaaagcattctcagaaactgctttgtgatatgcgcattcgactcaccgagttgaaacttttttttgatagagcagttttgaaacactctgtagaatctgaaagtggatatttggagctctttgagggctatggcggaaaagaaaatatattcacattaaagtagacagcagcattcccagaaacttctttaggatgtttgcagtaaactcacagagttgaacatacctttccgtagagcagttttgaaacactctgtttttgggatccgcaagtggatatttggaccactttgagacctttgctggaaacgggaatatcttcacatataaactagacagaagcattctcagaaacttcttcatgatgtgtgcattctaatcccaaatttgaatcttccttttcatgaagcagttttgaaacactctatttgtgcattctacaattggatgattggaacgctttgatgcccatggtagaaaaggaaatatcctcatataaaaactagacagaaggattcacagaaaatgctttgtgatgtgtgcattcaaatcacggagttgaatctttcttttgtgagagcagttttgaaacactgtttctgtggaatctgccagcggacacttggttcgctttgagggctatggtggagaaggaaatatcttcccataaaaactagaaagaagcattctcagaaacatttatgtgaagcgtgcattcaactcacagagttgaaccttccttttgatacaacagttttgaaacactcttttgaacaattgcaggtgaatctttggagcgctttgaagcctttgttggaaaagggaatatcttcacacacaaactagccagaagcattctcagaaacttctttgtgatgtgtgcgttgaacccagagagatgaacctttcctttgatagagcagtattgaaacgtgtttttgtaagatctgcaagcggatagttggcttcgctttgtgtcctttggtggaaacgggaatatcttctaataaaaactagacagaaatattctcagaatcttctttgtgatgtgggcattcaactaacacagttgaacgtttcttttcacagagcagttttgaaacactcttttggtagaatctgccagtggatatttggagcgctatgagggctcttgtgccaacggaaatatctgcccctaaaaactagacagaagcattctcagaaactgctttgtgatgtttgcattcaactcacagagttgaacataccttttcatagagcagttttgaaaacctctttttgtagaatctgcaagaggatattcggaccactttgaggccttcataggaaacagtaatatcttcacgtaaaaactagatagaagcattgtcagaaagttctttgtgatgtgtgaattcaactcacagagttgaaccttcctttaatagagcagttttgaaacactctttttctagaatctgcaagtagatatttggagcgctttgaggccatcgttggaaactggaatatcttcacataaaaagtagacagaggcattctcagaaacttttttgtgatatgtagattcaactcacagtgttgaacctttctttggatggagcagttttgaaaaacccttttatcgaatctgcaggtagacatttggggtgctttgagggctgtggtgcaaaaggaaatgtcttcccatagaaactagactgaagcattctcagcaacttctgtgtgacgtttgcattcatctcacagtgttgaacatacctttccatagagtagttttgaaacactgtttttgtagaatcggcaagtggatatttggactgctttgaggccttcatcggaaacgggaatatcttcacataaacactagagagaagcattctcagaaacttctttgtggtctgtccattcaactcacagagttgaaccttcctttttatggagcagttttgaaacactgtttttggaggatctgcaagtggatatttggagcgctttgaggcctacggtagaaaaagaactatctgcctatgacaactagacagaagcattctgagaaacttctttgtgatgtttgcattcaactaccagagttgaaccttccttttgatagggcagtttggaaacactctttttgtagaatctgcatgtggatatctggagcgatttgaggcctacggtccaaaaggaaatatcttcctgggaaaaatagaggaaagcattctcagaaactgctttgtgatatgtgcattcgactcaacgagttgaaacttttttttgatagagcagttttgaaacactctgtagaatctgaaagtggatatttggagctctttgagggctatggcggaaaagaaaacatattcacattaaactggacagcagcatactcagaaacttctttaggatgtttgcagtaaactcacagagttgaacatacctttccgtagagcagttttgaaacactctgtttgtgggatccgcaagtggatatttggaccgctttgagacctttgctggaaatgggaatatcttcacatataaactagacagaagcattctaagaaacttcttcttgatgtgtgcattctactcccgaatttgaatcttccttctcatgaagcagttttgaaacactctatttgcgcaatctactattggataattggaacgctttgatgcccatggtagaaaagaaaatatcctcatataaaaactagacagaaggattcacagaaaatgctttgtgatgtgtgcattcaaatcacggagttgaatctttcttttgttagagcagttttgaaacactgtttctgtggaatctgccagcggacacttggagcgctttgagggctacgatggagaaggaaatatcttcacataaaaactagaaagaagcattctcagaaacatttatgtgaagcgtgcattcaactcacagagttgaaccttcctttggatacaacagttttgaaacactcttttgaacaattgcaggtgaatctttggagcgctttgaagcctttgttggaaatgggaatatcttcacacacaaactagccagaagcattctcagaaacttctttgtgatgtgtgagttgaacccagagagatgaacctttccttggatagagcagttttgaaacgtgtttttgtaagatctgcaagtggataattggcttcgctttgtgtcctttggtggaaacgggaatatcttctaataaaaactagacagaaatattctcagaatctcctttgtgatgtgggcattcaactaacacagttgaacatttcttttcacagagcagttttgaaacactcttttggtagaatctgccagtggatatttggagcgctttgagggctgttgtgccaatggaaatatctgcccctgaaatctagacagaagcattctcagaaactacttcgtgatgtttgcattcaactcagagagttgaacatacctcttcacagagcagttttgaaaacctctttttgtagaatctgcaagtggatattcggagcactttgaggccttcataggaaacagtaatatcttcgcataaaaactagatagaagcattgtcagaaagttctttgtgatgtgtgaattcaactcacagagttgaaccttcctttaatagagcagttttgaaacactctttttctagaatctgcaagtagatatttggagcgctttgaggccatcgttggaaaccggaatatcttcacataaaaagtagacagaggcattgtcagaaacttttttggtgatatgtagattcaactcacagcgttgaacctttctttggatggagcagttttgaaaaacccttttatcgaatctgcaggtagacattcggggtgctttgagggctgtggtgcaaaaggaaatgtcttcccatagaaactagactgaagcattctcagcaacttcttggtgacgtttgcattcatctcacagtgttgaacatacctttccatagagtggttttgaaacactgtttttgtagaatcggcaagtggatatttggactgctttcaggccttcatcggaaacgggaatatcttcacataaacaccagagagaagcatcctcagaaacttctttgtcatctgtccattcaactcacagatttgaaccttcctttttctgcagcagttttgaaacactgtttttggagaatctgcaagtggatatttggagcgatttgaggcctatggtagaaaaagaaatatctgcctctaaaaaccagacagaagcattccgagaaacttctttgtgatgtttgcattcaactagcagagttgaaccttccttttgatagggcagtttggaaacactctttttgtagaatctgcatgtggatatactggagtggtttgaggcctacggtcaaaaaggaaatatcttcctgggaaaaatagacgaaagcattctcagaaactgctttgtgatatgtgcattcgactcaccgatttgaaacttttttttgatagagcagttttgaaacactctgtagaatctgaaagtggatatttggagctctttgagggctatggcggaaaagaaaatatattcacattaaactacacagcagcattctcagaaacttctttaggatgtttgcagtaaactcacagagttgaacctacctttccatagagcagttttgaaacactctgtttgtgggatccgcaggtggatatttggaccgctttgaggcctttgctggaaatgggaatatcttcacatataaactagacagaagcattctcagaaacttcctcgtgatgtgtgcattctactcccgaatttgaatcttccttttcctgaagcagttttgaaacactctgtttgtgcaatccacaattggataattggaacgctttgatgcccatggtagaaaaggaaatatcctcatatgaaaactagacagaaggattcacagaaaatgctttgtgatgtgtgcattcaaatcacggagttgaatctttcttttgacagagcagttttgaaacactgtttctgtggaatctgccagcggacacttggagcgctttgagggctacggtggagaaggaaatatcttcccataaaaactagaaagaagtattctcagaaccatttatgtgaagcgtgcgttcaactcacagagttgaaccttccttttgatagaacagttttgaaacactcttttgaacaattgcaggtgaatatttggagggctttgaagcctttgttggaaatgggaatatcttcacacacaaactagccagaagcattctcagaaacttctttgtaatgtgtgcgttgaacccagagagatgaacctttccttcgatagagcagttttgaaacgtgtttttgtaagatcggcaagcggataattggcttcgctttgtgtcctttggtggaaacgggaatatcttctaataaaaactagacagaaatattctcagaatcttctttgtgatgtgggcattcaactaacacatttgaacatttcttttcacagagcagttttgaaacactcttttggtggaatctgccagtggatatttggagcgctttgagggcgattgtgcctatggaaatatctgcccctaaaaactagacagaagcattctcagaaactgcttcgtgatgtttgcattcaactcacagggttgaacatacctctgcatagagcagttttgaaaacctctttttgtagaatctgcaagtggatattcggaccactttgaggccttcataggaaatagtaatatcttcacataaaaattagatagaagcattgtcagaaagttctttgtgatgtgtgaattcaactcacagagttgaaccttcctttaatagagcagttttgaaacactctttttctagaatctgcaagtagatatttggagcgctttgaggccttctttggaaaccggaatatcttcacaggaaaagtagatagaggcattctcagaaacttttttgtgatatgtagattcaactcacagcgttgaacctttctttggatggagcagttttgaaaaacccttttatcgaatctgcaggtggacatttggggtgctttgagggctgtggtgcaaaaggaaatgtcttcccatagaaactagactgaagcattctcagccacttatttgtgacgtttgcattcatctcacagtgttgaacatacctttccatagagtagttttgaagcactatttttgtagaatctgcaagtggatatttggactgctttgaggccttcatcggaaacgggaataccttcacataaacactagacagaagcattctcagaaacctctttgtggtctgtccattcaactcacagagttgaaccttcctttttatggagcagtattgaaacacagtttttggagaatctgcaagtggatatttggagcgctttgaggcctatggtagaaaaagaaatatctgcctatgacaactagacagaagcattctgagaaacttctttgtgatgggtgcatgcaactacaagagttgaaccttccttttgatagggcagtttggaaacactctttttgtagaatctgcatgtggatatctggagcgatttgaggcctatggtcaaaaaggaaatattttcctgggaaaaatagacgaaagcattctcagaaactgctttgtgacatgtgcattcgactcaccgtgttgaaactgtttttcgatagagcagttttgaaacactctgtagaatctgaaagtggatatttggagctctttgagggctatggcggaaaagaaaatatattcacattaaactagacagcagcattctcagagacttctttaggatgtttgcagtaaactcacagaagttgaacatacctttccgtaaagcagttttgaaaccctctgtttgtgggatctgcaagtggatatttggaccgctttgagacctttgctggaaatgggaatatcttcacatataaactagacagaagcattctcagaaacttcttcgtgatgtgtgcattctcctcccaaatttgaatcttccttttcatgaagcagttttgaaacactccgtttgtgtaatctacaattggataactggaaggctttgatgcccatggtagaaaaggaaataacctcatataaaaactagacagaaggattcacagaaaatgctttgtgatgtgtgcattcaaatcacggagttgaatctttcttttgttagagcagttttgaaacactgtttctgtggaatctgccagcggacacttggagcgctttgagggctatggtggagaaggaaataacttcccataaaaactagaaagaagcattctcagaaccatttatgtgaagcgtgcattcaactcacagagttgaaccttccttttgatagaacagttttgaaacactcttttgaacaattgcaggtgaatatttggagggctttgaagcctttgttggaaacgggaatatcttcacacacgaactagccagaagcattcccagaaacttctttgtgatgtgtgcgttgaacccagagagatgaacctttctttgatagagcagttttgaaacgtgtttttgtaagatcggcaagcggataattggcttcgctttgtgtcctttggtggaaacgggaatatcttctaataaaaactagacagaaatattctcagaatctcctttgtgatgtgggcattcaactaacacagttgaacatttcttttgacacagcagttttgaaacacacttttggtagaatctgccagtggatatttggagcgcttggagggctattgtgccaatggaaatatctgcccctgaaatctggacagaagcattctcagaaactgcttcgtgatgtttgcattcaactcacagagttgaacatacgtgtgcatagagcagttttgaaaacctctttttgtagaatctgcaagtggatattcggaccactttgaggccttcataggaaacagtaatatcttcacataaaaactagatagaagcattctcagaaagttctttgtgatgtgtaaattcaactcacagagttgaaccttcgtttaatagagcagttttgaaacactctttttctagaatctgcaagtagatatttggagcgctttgaggccttcgttggaaaccggaatatcttcacacaaaaagtagatagaggcatgctcagaaacttttttgtcatatgtagattcaactcacagcgttgaacctttcttttgatagagcagttttgaaaaactcttttatcgaatctgcaagtagacatttggagtgctttgagggcttctggtgcaaaaggaaatgtcttcccatagaaactagactgaaagcattctcagcaacttcttggtgacgtttgcattcatctcacagttttgaacatacctttccatagagtggttttgaaacactgtttttgtataatcggcaagtggatatttggactgctttcaggccttcatcggaaacgggaatatcttcacataaacactagagagaagcattctcagaaacttctttgtggtctgtccattcaactcacagagttgaaccttcctttttatggagcagttttgaaaccctgtttttggagaatctgcaagtggatatttggagcgctttgaggcctatggtagaaaaagaaatatctgcctatgacaactagacagaagcattctgagaaacttctttgtgatgtttgccttcaactaccggagttgaaccttccttttgatagggcagtttggaaacactctttttgtagaatctgcatgtggatatctggagcgatttgaggcctacggtccaaaaggaaatatcttcctgggaaagatagacgaaagcattctcagcaactgctttgtgatatgtgcattcgactcaccgagttgaaacttttttttgatagagcagttttgaaacactctgtagaatctgaaagtggatatttggagatctttgagggctatggcggaaaagaaagtatattcacattaaagtagacagcagcattccaagaaacttccttaggatgtttgcagtaaactcacagagttgagcattcctttccgtagagcagttttgaaacactctgtttgtgggatccgcaagtggacatttggaccgctttgagacctttgctggaaatgggaatatcttcacatataaactggacagaagcattctcagaaacttcttcatgatgtgtgcattctcctcgcgaatttgaatcttccttttcatgaagcagttttgaaacactctgtttgtgcaatccacaattggataattggaacgctttgatgcccatggtagaaaaggaaatatcctcatataaaaactagacagaaggattcacagaaaatgctttgtgatgtgtgcattcaaatcacggagttcaatctttcttttgttagagcagttttgaaacactgtttctgtggaatctgccatcggacacttggagcgctttgagggctgtggtggagaaggaaatatcttcccataaaaactagaaagaagcattctcataaacatttatgtgaagcgtgcattcaactcacagagttgaaccttcgttttgatagaacagtttggaaacactcttttgaacaattgcaggtgaatctttggagcgctttgaagcctttgttggaaatgggaatatcttcacacacaaactagccagaagcattctcagaaagttctttgtgatgtgtgcgttgaacccagagagatgaacctttccttggatagagcagttttgaaacgtgtttttgtaagatctgcaagtggataattggcttcgctttgtgtcctttggtggaaacgggaatatcttctaataaaaactagacagaaatattctcagaatctcctttgtgatgtgggcattcaactaacacagttgaacatttcttttcacagagcagttttgaaacactcttttgggagaatctgccagtggatatttggagcgcttggagggctattgtgccaatggaaatatctgcccctgaaaactagacagaagctttctcagaaactacatagtgatgttcgcattcgactcacagagttgaacatacctcttcatagagcagtttttaaaaccttttttgtagaacctgaaagtggatattcggaccactttgaagccttcataggaaacagtaatatcttcacataaaacctagatagaagcattgtcagaaacttctttgtgatgtgtgaattcaactcacagagttgaaccttcctttaatagagcagttgtgaaacactctttttctagaatctgcaagtagatatttggagcgctttgaggccttcgttggaaaccggaatatcttcacaggaaaagtagatagaggcattctcagaaacttgttttgtgatatgtagattcaactcacagcgttgaacctttctttggatggagcagttttgaaaacctcttttatcgaatctgcaggtaaacatttggggtgctttgagggctgcggtgcaaaaggaaatgtcttcccatagaaactagactgaagcattctcagcaacttcttcgtgaggtttgcattcatttcacagtgttgagcatacctttccacagagtagttttgaaacactatttttgtagaatttgcaactggatatttggactgctttgaggccttcatcggaaacgggaatatcttcacataaacactagacagaagcattctcagaaacttctttgtgatctgtccattcaactcacagagttgaaccttcctttttatggagcagctttgaaacactgtttttggagaatctgcaagtggatattcggagcggtttgaggcctatggtagaaaaagaaacatctgcctctaaaaactagactgaagcattctgagaaacttctttgtgatgtttgcattcaactaccagagttgaaccttccttttgattgcgcagtttggaaacactctttttgtagaatctgcatgtggatatctggagcgatttgaggcctacggtcaaaaaggaaatatcttcctgggaaaaatagacgaaatcattctcagaaactactttgtgttatgagcattcaactcacagagttgaaccttttttttgatagagcagttttgaaacactctgtagaatctgaaagtggatatttggagctctttgagggctatggtggaaaagaaaatatattcacattaaactagacagcagcattctcagtaacttctttaggatgtttgcagtaaactcacagagttgaacataactttccgtagagcagttttgaaacactctgtttgtgggatccgcaaggggatatttggaccgctttgagacctttgctggaaatgggaatatcttcacatataaactagacagaagcattctcagaaacttcttcgtgatgtgtgcattctactcccaaatttgaaacttccttttcatgaagcagttttgaaacactctatttgtgcattctacaattggatgattggaacgctttgatgcccatggtagaaaaggaaatatcctcatataaaaactagacagaaggattcacaaaaaatgctttgtgatgtgtgcattcaaatcacggagttgaatctttcttttgttagagcagttttgaaacactgtttctgtggaatctgccagcggacacttggagcgctttgagggctgtggtggagaaggaaatatcttcccataaaaactagaaagaagcattctcagaaacatttatgtgaagcgtgctttcaactcacagagttgaaccttccttttgatacaacagttttgaaacacccttttgaacaattgcaggtgaatctttggagcgctttgaagcctttgttggaaatgggaatatcttcacacacaaactagccagaagcattctcagaaacttctttgtgatgtgtgcgttgaacccagagagatgaacctttccttggatagagcacttttgaaacgtgtttttgtaagatctgcaagcggataattggcttcgctttgtgtcctttggtggaaacgggaatatcttctaataaaaactagacagaaatattctcagaatctcctttgtgatgtgggcattcaactaacacagttgaacatttcttttcacagagcagttttgagacactcttttggtagaatctgccagtggatatttggagcgctttgagggctgttgtgccaatggaaatatctgcccctaaaatctagacagaagcattctcagaaactacttcgtgatgtttgcattcaacacacagagttgaacatacctcttcacagagcagttttgaaaacctctttctgtagaatctgcaagtgatattcggaccactttgaggccttcataggaaacagtaatatcttcacataaaaactagatagaagcattgtcagaaagttctttgtgatgtgtgaattgaaatcacagagttgaaccttcctttaatagagcagttttgaaacactctttttctagaatctgcaagtagatatttggagagctttgaggccttcgttggaaaccggaatatcttcacataaaaagtagatagaggcattctcagaaacttttttgtgatatgtagattcaactcacagcgttgaacctttctttggatggagcagttttgaaaaactcttttatcgaatctgcaggtagacatttggggtgctttgagggctgtggcgcaaagggaaatgtcttcccatagaaactagactgaagcattctcagcaacttctttgtgacgtttgcattcatctcacagtgttgaacatacctttccatagagtagttttgaaacactgtttttgtagaatcggccagtggatatttggactgctttgaggccttcatcggaaacgggaatatcttcacataaacactagagagaagcattctcagaaacttctttgtcatctgtccattcaactcacagagttgaaccttcctttttatggagcagttttgaaacactccttttggagaatctgcaagtggatatttggagcgctttgaggcctatggtagaaaaaggaatatctgcctctgaaaaccagacagaagcattccgagaaacttctttgtgatgtttgcattcaactagcagaggtgaaccttccttttgatagggcagtttggaaacactctttttgtagaatctgcatgtggatatcttgagcggtttgaggcctacggtcaaaaaggaaatatcttcctgggaaaaatagacgaaagcattctcagaaagggctttgtgatatgcgcattcgactcaccgagttgaaacttttttttgatacagcagttttgaaacactctgtagaacctgaaagtggatatttggaactctttgagggctatgacggaaaagaaaatatattcacattaaagtagacagcagcattctcagaaacttctttaggatgtttgcagtaaactcacagagttgaacatacctttccgaagagcagttttgaaacactctgtttgtgggatccgcaagtggatatttggaccgctttgagacctttgctggaaatgggaatatcttcacatataaactagacagaagcattctcaaaaacttcttcgtgatgtgtgcattctactcccaaatttgaatcttccttttcatgaagcagttttgaaacactctatttctgcaatctacaattggataattggaacgctttgatgcccaaggtagaaaaggaaatatcctcatataaaaacttgacagaaggattcacagaaaatgctttgtgatgtgtgcattcaaatcacggggttgaatctttcttttgttagagccgttttgaaacactgtttctgtggaatctgccagcggacacttggagcgctttgagggccatggtggagaaggaaatatctttccataaaaactaaaaagaagcattctcagaaacatttatgtgaagcgtgtattcaactcacagagttgaaccttccttttgatagaacagttttgaaacactcttttgaacaattgcaggtgaatctttggagcgctttgaagcctttgttggaaatgggaatatcttcacacacaaactagccagaagcattctgagaaacttctttgtgatgtgtgcgttgaacccagagagatgaacgtttcctttgatagagcagttttgaaacgtgtttttttaagatctgcaagcggataattggcttcgctttgtgtcctttggtggaaacgggaatatcttctaataaaaactagacagaaatattctcagaatctcctttgtgatgtgggcatttaactaacacagttgaacatttcttttcacagagcagttttgagacactcttttggtagaatctgccagtggatatttggagcgctttgagggctgttgtgccaatggaaatatctgcccctaaaatctagacagaagcattctcagaaactacttcgtgatgtttgcattcaacacacagagttgaacatacctcttcacagagcagttttgaaaacctctttctgtagaatctgcaagtggatattcggaccactttgaggtcatcataggaaacagtaatatcttcacataaaaactagatagaagcattgtcagaaagtactttgtgatgtgtgaattcaactcacagagttgaaccttcctttaatagagcagttgtgaaacactctttttctagaatctgcaagtagatatttggagcgctttgaggccttcgttggaaaccggaatatcttcacaggaaaattagatagaggcattctcagaaacttttttgtgatatgtagattcaactcacagtgttgaacctttctttggatggagcagttttgaaaaactcttttatcgaatctgcaggtagacatttggggtgctttgagggctctggtgcaaaaggaaaagtcttcccatagaaactagactgaagcattctcagcaacttcttggtgacgtttgcattcatctcacagtgttgaacatacctctccatagagtggttttgaaacactgtttttgtagtatcggcaagtggatatttggactgctttgaggccttcatcggaaacgggaatatcttcacataaacactagagagaagcattctcagaaacttctttgtcatctgtccattcaactcacagagttgaaccttcctttttatggagcagatttgaaacactccttttggagaatctgcaagtggatatttggagcgctttgaggcctatggtagaaaaagaaatatctgcttctaaaaaccagacagaagcattccgagaaacttctctgtgatgtttgcattcaagtagcagagttgaaccttccttttgatagggcagtttggaaacactctttttgtagaatctgcatgtggatatctggagcggtttgaggcctacggtcaaaaaggaaatatcttcctgggaaaaatagacgaaagcattctcagaaagggctttgtgatatgcgcattcgactcaccgagttgaaacttttttttgatacagcagttttgtaacactctgtagaatctgaaagtggatatttggagctctttgagggctatggcggaaaagaaaatatattcacattaaagttgacagcagcattctcagaaacttctttaggatgtttgcagtaaactcaaggaattgaacatacctttccgtagagcagttttgaaacactctgtttgtgggatccgcaagtggatatttggacagctttgagacctttgctggaaatgggaaaatcttcacatataaactagacagaagcattctcagaaacttcttcgtgatgtgtgcattctcctcccgaatttgaatcttccttttcctgaagcagttttgaaacactctgtttgtgcaatccacaattggataattggaacgctttgatgcccatggtagaaaaggaaatatcctcatataaaaactagacagaaggattcacagaaaatgctttgtgatgtgtgcattcaaatcacggaggtgaatctttgttttgttagagcagttttgaaacactgtttctgtggaatctgccagcggacacttggagcgctttgagggctatggtggagaaggaaatgtcttcacataaaaactagaaagaagcattctcagaaacatgtatgtgaagcgtgcattcaactcacagagttgaaccttccttttgatacaacagttttgaaacactcttttgaacaattgcaggtgaatctttggagcgctttgaagcctttgttggaaatgggaatatcttcacacacaaactagccagaagcattctcagaaacttctttgtgatgtgtgcgttgaacccagagagatgaacctttcctttgatagagcagttttgaaacgtgtttttgtaagatctgcaaggggataatgggcttcgctttgtgtcctttggtggaaacgggaatatcttctaataaaaactagacagaaaatattctcagtatctcctttgtgatgtgggcattcaactaacacagttgaacatttcttttcacagagcagttttgaaacactcttttggtagaatctgccagtggatatttggagcgcttggagggctattgtgccaatggaaatatctgcccctgaaaactagacagaagcattctcagaaactacttcgtcatgtctgcattcaacacacagagttgaacatacctcttcacagagcagttttgaaaacctctttctgtagaatctgcaagtggatattcggaccactttgaggccttcataggaaacagtaatatcttcacataaaaactagatagaggcattctcagaaagttttttgtgatatgtagattcaactcacagcattgaacctttctttggatggagcagttttgaaaaacccttttatcgaatctgcaggtagacatttggggtgctttgagggctgtggtgcaaaaggaaatgtcttcccatagaaactagactgaaagcattctcagcaacttctttgtgacgtttgcattcatctcacagtgttgaacatacctttccatagagtagttttgagacactatttttgtagaatctgcaagtggatatttggactgctttgaggccttcatcggagacgggaatatcttcacataaacactaggcagaagcattctcagaaactactttgtgatctgtccattcaactcacagagttgaaccttcctttttatggagcagttttgaaacactgtttttggagaatctgcaagtggatatttggagcgctttgaggcttatggtagaaaaagaaatatctgcctctaaaaactagacagaagcattctgagaaacttctttgtgatgtttgcattcaactaccagagttgaatcttccttttgatagggcagtttggaaacactctttttgtagaatctgcatgtggatatctggagcgatttgaggcctatggtcaaaaaggaaatatcttgcctgggaaaaatagacgaaagcattctcagaaactgcttcgtgatatgtgcattcgactcaccgagttgaaacttttttttgatagagcagttttgaaacaccctgtagaatctgaaagtggatatttggagctctttgagggctatggcggaaaagaaaagatattcacattaagctagacagcagcattctcagaaacctctttaggatgtttgcagtaaactcacagagttgaacatacctttccttagagcagttttgaaacactctgtttgtgggatccgcaagtggatatttggaccgctttgagacctttgctggaaatgggaatatcttcacatataaactagacagaagcattctcagaaacttcttcgtgatgtgtgcattctcctcccgaatttgaatcttccttttcatgaagcagttttgaaacactctgtttgtgcaatccacaattggataattggaacgctttgatgcccatggtagaaaaggaaatatcctcatataaaaattagacagaaggattcacagaaaatgctttgtgatgtgtgcattcagatcacggagttgaatctttcttttgttagagcagttttgaaacaccgtttctgtggaatctgccagcggacacttggagcgctttgagggctatggtggagaaggaaatatcttcacataaaaactagaaagaagcattctcagaaacatttatgtgaagcgtgcattcaactcacagagttgaaccttcgttttgatagaacagttttgaaacactcttttgaacaattacaggtgaatctttggagcgctttgaagcctttgttggaaatgggaatatcttcacacacaaactagccagaagcattctcagaaacttctttgtgatgtgtgcgttgaacccagagagatgaacctttccttggatagagcagttttgaaacgtgtttttgtaagatctgcaagcggataattggcttcgctttgtgtcctttggtggaaacaggaatatcttctaataaaagctagacagaaatattctcagaatctcctttgtgatgtgggcattcaactaacacaattgaacatttcttttcacagagcagttttgaaacacagttttggtagaatctgccagtggatatttggagcacttggagggctactgtgccaatggaaatatctgcccctgaaaattagacagaagcattctcagaaactacattctgatgtttgcattcgactcacagagttgaacatacctcttcatagagccgttttgaaaaccttttttgtagaatctgaaagtggatattcggaccactttgaggccttcataggaaacagtaatatcttcacataaaaactagatagaagcattgtcagaaagttcttggtgatgtgtgaattcaactcacagagttgaaccttcctttaatagagcagttttgaaacactctttttctagaatctgcaagtagatacttggagcgctttgaggccttcgttggaaaccggaatatcttcacaggaaaagtagatagaggcattctcagaaacttttttgtgatatgtagattcaactcacagcgttgaacctttcttttgatagagcagttttgaaaaactcttttatcgaatctgcaagtagacatttggagtgctttgagggctgtggtgcaaaaggaaatgtcttcccatagaaactagactgaagcattctcagcaacttctttgtgacgtttgcattcatctcacagggttgaacatacctttgcatagagtagttttgaaacactgtttttgtagaatctgcaagtggatatttggactgctttgaggccttcatcggaaacgggaatatcttcacataaacactagacagaagcattctcagaaacttctttgtgatctgtccattcaactcacagagttgaaccttcctttttatggagcagttttgaatcactgtttttggagaatctgcaagtggatatttcgagcgctttgaggcctatggtagaaaaagaaatatctgcctctaaaaaccagacagaagcattccgagaaacttctctgtgatgtttgcattgaactagcagagttgaaccttccttttgatagggcagtttggaaacactctttttgtagaatctgcatgtggatatctggagcggtttgaggcctacggtcaaaaaggaaatatcttcctgggaaaaatagacgaaatcattctcagaaactactttgtgttatgtgcattcaactcacagagttgaaccttttttttgatagagcagttttgaaacactctgtagaatctgaaagtggatatttggagctctttgagggctatggtggaaaagaaaatatattcacattaaactagacagaagcattctcagtaacttctttaggatgtttgcagtaaactcacagagttgaacatacctttccgtagagcagttttgaaacactctgtttgtgggatccgcaaggggatatttggaccgctttgagacctttgctggaaatgggaatatcttcacatataaactagacagaagcattctcagaaacttcttcgtgatgtgtgcattctcctcccaaatttgaatcttccttttcatgaagcagttttgaaacactctgtttgtgcaatccacaattggataattggaacgctttgatgcccatggtagaaaaggaaatatcctcatataaaaactagacagaaggattcacagaaaatgctttgtgatgtgtgcattcaaatcatggagttgaatctttcttttgtcagagcagttttgaaacactgtttctgtggaatctgccagcgaacacttggagcgctttgagggctatggtggagaaggaaatatcttcccataaaaactagaaagaagcattctcagaaacatttatgtgaagcatgcattcaactcacagagttgaaccttccttttgatagaacagttttgaaacactcttttgaacaattgcaggtgaatctttggagcgctttgaagcctttgttggaaatgggaatatcttcacacacaaactagccagaagcattctcagaaacttctttgtgatgtgtgcgttgaacccagcagagatgaacctttccttggatagagcagttttgaaacgtgtttttgtaagatctgcaagcggataattggcttcgctttgtgtcctttggtggaaacgggaatatcttctaataaaaactagacagaaatattctcagaatcttctttgtgatgtgggcattcaactaacacagttgaacatttcttttcacagagcagttttgaaacactcttttggtagaatctgccagtggatatttggagcgctttgaagactattgtgccaatggaaatatctgcccctaaaaactagacagaagcattctcagaaactacttcgtgatgtttgcattcaacacacagagttgaacatacctcttcacagagcagttttgaaaacctctttctgtagaatctgcaagtggatattcggaccactttgaggccttcataggaaacagtaatatcttcacataaaaactacatagaagcattgtcagaaagttctttgtgatgtgtgaattcaactcacagagttgaaccttcctttaatagagcagttttgaaacactctttttctagaatctgcaagtagatatttggagcgctttgaggccttcgatggaaaccggaatatcttcacaggaaaagtagatagaggcattctcacgaaacttttttgtgatatgtagattcaactcacagcgttgaacctttctttggatggagcagttttgaaaaactcttttatcgaatctgcaggtagacatttggggtgctttgagggctgtggtgcaaaaggaaatgtcttccaatagaaactagactgaagcattctcagcaacttctttgtgacgtttgcattcatctcacagtgttgaacatacctttccatcgagtacttttgaaacactgtttttgtagaatctgcaagtggatatttggactgctttgaggccttcatcggaaacgggaatatcttcacataaacactagagagaagcattctcagaaacttctttgtggtctgtccattcaactcacagtgttgaaccttcctttttatggagcagttttgaaaccctgtttttggagaatctgcaagtggatatttggagcgctttgaggcctatggtagaaaaagaaatatctgcctatgacaactagacagaagcattctgagaaacttctttgtgatgtttgcattcaactagcagagttgaaccttccttttgatagggcagtttggaaacactctttttgtagaatctgcatgtggatatctggagcggtttgaggcctacggtcaaaaaggaaatatcttcctgggaaaaatagacgaaagcattctcagaaagtgctttgtgatatgtgcattcgactcaccgagttgaaacttttttttgatagagcagttttgaaacactctgtagaatctgaaagtggatatttggagctctttgagggctatggcagaaaagaaaatatattcacattaaagtagacagcagcattctcagaaacttctttaggatgtttgcagtaaactcacagagttgaacatacctttccaaagagcagttttgaaacactctgtttgtgggatccgcaagtggatatttgggccgctttgagacctttgctggaaatgggaatatcttcacatataaactacacagaagcattctcagaaacttcttcgtgatgtgtgcattctactcccaaatttgaatcttccttctcatgaagcagttttgaaacactctgtttgtgcaatctacaattggataattggaacgctttgatgcccatggtagaaaaggaaatatcctcatataaaaactagacagaaggattcacagaaaatgctttgtgatgtgtgcattcaaatcacggtgttgaatcttattttgttagagcagttttgaaacactgtttctgtggaatctgcccgcggacacttggagcgctttgagggctgtggtggagaagggaatatcttcccataaaaactagaaagaagcattctcagaaacatttatgtgaagcgtgcattcaactcacagagttgaaccttccttttgatacaacagttttgaaacactctttggaacaattgcaggtgaatctttggagcgctttgaagcctttgttggaaatgggaatatcttcacacacaaactagccagaagcattctcagaaaattctttgtgatgtgtgcgttgaacccagagagatgaacctttcctttgatagagcagttttgaagcgtgtttttgtaagatcggcaagcggataattggcttcgctttgtgtcctttggtggaaacgggaatatcttctaataaaaactagacagaaatattctcagaatcttctttgtgatgtgggcattcaactaacacagttgaacctttcttttcacagagcagttttgaaacaaccttttggtagaatctgccagtggatatttggagcgctttgagggctattgtgccaacggaaatatctgcccctaaaaactagacagaagcattctctgaaactactttgtgatgtttgcattcaactcacagagttgaacatacctcttcatagagcagttttgaaaacctctttttgtagaatctgcaagtggatattcggaccactttgaggccttcataggaaacagtaataccttcacataaaaactagatagaagcatagtcagaaagttctttgtgatgtgtgaattcaaatcacagagttgaaccttcctttaatagagcagttttgaaacactctttttctagaatctgcaagtagatatttggagcgctttgaggccttcgttggaaaccggaatatcctcacataaaaagcagatagaggcattctcagaaactttttcgtgatatgtggattcaactcacagcgttgaacctttcttttgatagagcagttttgtaaaactcttttatcgaatctgcaagtagacatttggagtgctttgagggttgtggtgcaaaaggaaatgtcttcccataggaactagactgaagcattctcagcaacttcttggtgacgtttgcattcatctcacagtgttgaacatacctttccatagagtggttttgaaacactgtttctgtagaatcggcaagtggatatttggactgctttgaggccttcatcggaaatgggaatatcttcacataaacactagagagaagcattctcagaaacttctttgtgatctgtccattcaactcacagagttgaaccttcctttttatggagcagttttgaaacactctttttggagaatctgcaagtggatatttggagcgctttgaggcctatggtagaaaaagaaatatctgcctctaaaaaccagacagaagcattccgagaaacttctctgtgatgtttgcattcaactagcagagttgaaccttccttttgatagggcagtttggaaacactcttttgtagaatctgcatgtggatatctggagcggtttgaggcctacggtcaaaaaggcaatatcttcctgggaaaaatagacgaaagcattctcagaaactgctttgtgatatgtgcattccagtcaccgagttgaaacttttttttgatagagcagttttgaaacactctgtagaatctgaaagtggatatttggatctctttgagggctatggcggaaaagaaaatatattcacattaaagtagacagcagcattcccagaaacttctttaggatgtttgcagtaaactcacagagttgaacatacctttccgtagagcagttttgaaacactctgtttgtgggatccgcaagtggatatttggaccgctttgagacctttgctggaaacgggaatatcttcacatatcaactagacagaagcattctcagaaacttcttcgtgatgtgtgcattctactcccgaatttgaatcttccttttcatgaagcagttttgaaacactctgtttgtgcaatccacaagtggataattggaacgctttgatgcccatggtagaaaaggaaatatcctcatataaaaattagacagaaggattcacagaaaatgctttgtgatgtgtgcattcgaatcacggagttgaatctttcttttgttagagcagttttgaaacacagtttctgtggaatctgccagcggacacttggagcgctttgaggtctatggtggagaaggaaatatcttcccataaaaactagaaagaagcattctcagaaccatttatgtgaagcgtgcattcaactcacagagttgaaccttccttttgatagaacagttttgaaacactcttttgaacaattgcaggtgaatatttggagggctttgaagcctttgttggaaacgggaatattcttcacacacgaactagccagaagcattctcagaaacttctttgtgatgtgtgcgttgaacccagagagatgaacctttcctttgatagagcagttttgaaacgtgtttttgtaagatctgcaagcggataattggcttcgcattgtgtcctttggtggaaacgggaatatcttctaataaaaactagacagagatattctcagaaacttctttgtgatgtgggcattcaactaacacagttgaacatttcttttcacagagcagttttgaaacactcttttggtcgaatctgccagtggatatttggagcgctttgagggctattgtgccaatggaaatatctgcccctaaaaactagacagaagcattctcagaaactacttcgtgatgtttgcattcaacacacagagttgaacatacctcttcacagagcagttttgaaaacctctttctgtagaatctgcaagtggatatttggaccactttgaggccttcttaggaaacagtaatatcttcacataaaaactagatagaagcattgtcagaaagttctttgtgatgtgtgaattcaactcacagaattgaaccttcctttaatagagcagttttgaaacactctttttctagaatctgccagtagatatttggagcgctttgaggccttcgttggaaaccggaatatcttcacataaaacgtagatagaggcattctcagaaactttttcgtgatatgtggattcaactcacagcgttgaacctttcttttgatagagcagttttgtaaaactcttttatcgaatctgcaagtagacatttagagtgctttgagggctgtggtgcaaaaggaaatgtcttcccatagaaactagactgaagcattctcagcaacttctttgtgacgtttgcattcatctcacagtgttgaacatacctttccatacagtagttttgaagcactatttttgtagaatctccaagtggatatttggactgctttgaggccttcatcggaaacgggaatatcttcacataaacactagacagaagcattctcagaaacttctttgtgatctgtccattcaactcacagagttgaaccttcctttttatggagcagttttgaaacactgtttttggagaatcttcaagtagatatttggagcgctttgtggcctatggtagaaaaagaaatatctgcctataacaactagacagaggcattctcagaaacttctttgtgatgtttgcattcaactcacagagttgaacatacctcttcatagagcagttttgaaaacctctttttgtagaatctgcaagtggatatttggaccactttgaggccttcatagaaaacagtaatatcttcacataaaaactagatggaagcattctcagaaactgctttgtgatatgtgcattcgactcaccgagttgaaactttttttggatagagcacttttgaaacactctgtagaatctgaaagtggatatttggagctctttgagggctatggcggaaaagaaaagatattcacattaaactagacagcagcattcccagaaacttctttaggatgtttgcagtaaactcacagagttgaacatacctttccgtagagcagttttgaaacactctgtttgtgggatccgcaagtggatatttggacccctttgagacctttgctggaaacgggaatatcttcacacataaactagacagaagcattctcagaaacttcttcgtgatttgtgcattgtactcccaaatttgaatcttccttcccaaggagcagttttgaaacactctgtttgtgcaatctacaattggagaattggaacgcttggatgcccgtggtagaaaaggaaatatcctcatataaaaactagacagaaggattcacagaaaatgctttgtgatgtgtgcattcagatcacggagttgaatctttcttttgttagagcagttttgaaacactgtttctgtggaatctgtcagcagacacttggagtgctttgagggctatggtggagaaggaaatatcttcacataaaaactagaaagaagcattctcagaaacatttatgtgaagcttgcattcaactcacagagttgaaccttccctttgatacaacagttttgaaacacccttttgaacaattgcaggtgaatctttggagcgctttgaagcctttgttggaaatgggaatatcttcacacacaaactagccagaagcattctcagaaacttctcgtgatgtgtgcgttgaacccagagagatgaacctttcctatgatagagcagttttgaaacgtgtttttgtaagatctgcaagcggataattggcttcgctttgtgtcctttggtggaaacgggaatatcttctaataaaaactagacagagatattctcagaaacttctttgtgatgtgggcattcaactaacacagttgaacattgcttttcacagagcagttttgaaacactcttttggtcgaatctgccagtggatatttggagcgctttgagggctattgtgccaatggaaatatctgcccctaaaaactagacagaagcattctcagaaactgctttgtgatgtttgcattcaactcacagagttgaacatacctcttcatagagcagttttgaaaacctctttttgtagaatctgcaagtggatatttggaccactttgaggccttcatagatacagtaatatcttcacataaaaactagatggaagcattgtcagaaagttctttgtgatgtgtgaattcaactcacagagttgaaccttcctttaatagagcagttttgaaacactctttttctagaatctgccagtagatatttggagcgctttgaggccttcgttggaaaccggaatatcttcacataaaacgtagatagaggcattctcagaaactttttttgtgatatgtagattcaactcacagcgttgaacctttctttggatggagcagttttgaaaaacccttttatcgaatctgcaggtagacattcggggtgctttgagggctgtggtgcaaaaggaaatgtcttcccatagaaactagactgaagcattctcagcaacttctttgtgacgtttgcattcatctcacagtgttgaacatacctttccatagagtagttttgaagcactatttttgtagaatctgcaagtggatatttggactgctttcaggccttcatcggaaacgggaatatcttcacataaacactagacagaagcattctcagaaacttctttgtggtctgtccattcaactcacagagttgaaccttcctttttatggagcagttttgaaaccctgtttttggagaatctgcaagtggatatttggagtgctttgaggcctatggtagaaaaagaaatatctgcctatgacagctagacagaagcattccgagaaacttctttgtgatgtttgcattcaactagcagagttgaaccttccttttgatagggcagtttggaaacactctttttgtagaatctgcatgtggatatctggagcggtttgaggcctacgttcaaaaaggaaatatcttcctgggaaaaatagacgaaagcattctcagaaagtgctttgtgatatgtgcattcgactcaccgagctgaaacttttttttgatagagcagttttgaaacactctgtagaatctgaaagtggatatttggagctctttgagggctatggcggaaaagaaaatatattcacattaaaaaagtagacagcagcattctcagaaacttctttaggatgtttgcagtaaactcacagagttgaacatacctttccgtagagcagttttgaaacactctgtttgtgggatccgcaagtggatatttggaccgctttgagacctttgctggaaatgggaataacttcacatataaactagacagaagcattctcagaaacttcttcgtgatgtgtgcattctactcccaaatttgaatcttccttttcatgaagcagttttgaaacactctgtttctgccatctacaattggataattggaacgctttgatgcccaaggtagaaaaggaaatatcctcatatagaaactagacagaaggattcacagaaaatgctttgtgatgtgtgcattcaaatcaccggagttgaatctttcttttgttagagcagttttgaaacactgtttctgtggaatctgccagcggacacttggagcgctttgagggctgtggtggagaaggaaatatcttcccataaaaactagaaagaagcattctcagaaacatttatgtgaagcgtgcattcaactcacagagttgaaccttccttttgatacaacagttttgaaacactcttttgtacaattgcatgtgaatctttggagcgctttgaagcctttgttggaaatgggaatatcttcacacacaaactagccagaagcattctcagaaacttctttgtgatgtgtgcgttgaacccagagagatgaacctttcctttgatagagcagttttcaaacgtgtttttgtaagatcggcaagcggataattggcttcgctttgtgtcctttggtggaaacgggaatatcttctaataaaaactagacagaaatattctcagaatctcctttgtgatgtgggcattcaactaacacagttgaacatttcttttcacagagcagttttgaaacactcttttggtagaatctgccagtggatatttggagcgatttgagggctattgtgccaatggaaatttctgcccctgaaaactagacagaagcattctcagaaactgctttgtgatgtttgcattcaactaccagagttgaacttccctcttcatagagcagttttgaaatcctctttttgtagaatctgcaagtggatatttggaccactttgaggccttcagagtaaatagtaatatcttcacataaaaactagatagaagcattctcagaaacttctttgtgatgtgtgaattcaactcacagagttgaaccttcctttaatagtgcagttttcaaacactctttttgtagaatctgcaagtagatatttggagcactttgaggccttcattggaaactggaatatcttcacataaatagtagatagaggcattctcagaaacttttttgttatatgtagattcaactcacagtgttgaagctttcttttgattgaacagttttgaagaactcttttatcgaatctgcaagtagacatttggagttctttgagggctgtagtcgaaaaggaaatatcatcacatagaaactagactgaagcattctcagcaacttcttggtgacgtttgcattcatctcacagtgttgaacatacctttccatagagtggttttgaaacactgtttttgtagaatcggcaagtggatatttggactgctttgaggccttcatcggaaacgggaatatacttcacataaacactagagagaagcattctcagaaacttctttgtcatctgtccattcaactcacagagttgaaccttcctttttctggagcagttttgaaacactccttttggagaatctgcaagtggatatttggagcgctttgaggcctatggtagaaaaagaaatatctgcctctaaaaaccagacagaagcattccaagtaaacttctctgtgttgtttgcattcaactagcagagttgaaccttccttttgatagggcagtttggaaacactctttttgtagaatctgcatgtggatatctggagcggtttgaggcctacggtcaaaaaggaaatatcttcctgggataaatagacgaaagcattctcagaaactgctttgtgatatgggcattcgactcaccgagttgaaacttttttttgatagagcagttttgaaacactctatagaatctgaaagtggatatttggagctctttgagggctatggcggaaaagaaaatatattcacattaaagtagacagcagcactcccagaaacttctttaggatgtttacagtaaactcacagagttgaacatacctttctgtagagcagttttgaaacactctgtttgcgggatccgcaagtggatatttggaccgctttgagacctttgctggaaatgggaatatcttcacatatgaactagacagaagcattctcagaaacttcttcgtgatgtgtgcattctactcccaaatttgaatcttccttttcatgaagcagttttgaaacactctgtttgtgcaatccacaattggataattggaaagctttgatgcccatggtagaaaaggaaatatcctcatataaaaactagacagaaggattcacagaaaattctttgtgatgtgtgcattcaaatcacggagttgaatctttcttttgttagagcagttttgaaacactgtttctgtggaatctgccagcggacacttggagcgctttgagggctatggtggagaaggaaatatcttcacataaaaactagaaagaaatattctcagaatcttctttgtgatgtgggcattcaactaacacagttgaacatttcttttcacagaacagttttgaaacactcttttgaacaattgcaggtgaatctttggaacgctttgaagcctttgttggaaataggaatatattcacacacaaactagccagaagcattctcagaaatttctttgtgatgtgtgcgttgaacccagagagatgaacctttccttcgatagagcagttttgaaacgtgtttttgtaagatcggcaagcggataattggcttcgctttgtgtcctttggtggaaacgggaatatcttctaataaaaactagacagaaatattctcagaatctcctttgtgatgtgggcattcaactaacacagttgaacatttcttttcacagagcagctttgaaacactctttggtagaatctgccggtggatatttggagcgcttggagggctattgtgccagtggagatatctgcccctgaaaactagacagaagcattctcagaaactacttcgtgatgtttgcattcaacacacagagttgaacatacctcttcacagagcagttttgaaaacctctttctgtagaatctgcaagtggatattcggaccactttgaggacttcataggaaacagtaatatcttcacataaaaactagatagaagcattgtcagaaagttctttgtgatgtgtgaattcaactcacagagttgaaccttcctttaatagagcagttttgaaacactttttttctggaatctgcaagtagatatttggagcgctttgaggccttcgttggaaaccggagtatcttcacaggaaaagtagatagaggcatgctcagaaacttttttgtcatatgtagattcaactcacagcgttgaacctttcttttgatagagcagttttgaaaaactcttttatcgaatctgcaagtagacatttggagtgctttgacggctctggtgcaaaaggaaatgtcttcccatagaaagtagactgaagcattctcagcaacttcttggtgacgtttgcattcatctcacagtgttgaacatacctttccatagagtggttttgaaacactgtttttgtagaatcggcaactggatatttggactgctttgaggccttcatcggaaacgggaatatcttcacataaacactagagagaagcattctcagaaacttctttgtcatctgtccattcaactcacagagttgaaccttcctttttatagagcagttttgaaacactccttttggagaatccgcaagtggatatttggagcgctttgaggcctatggtagaaaaagaaatatctgcctctaaaaaccagacagaagcattctgagaaacttctttgtgatgtttgcattcaactaccagagttgaaccttccttttcatagggcagtttggaaacactctttttgtagaatctgcatgtggatatctggagcgatttgaggcctacggtcaaaaaggaaatatcttcctgggaaaaatagacgaaagcattctcagaaagtgctttgtgatatgtgcattcgactcaccgagttgaaacttttttttgatagagcagttttgaaacactctgcagaatctgaaagtggatatttggagctctttgagggcttaggcggaaaagaaaatatattcacattaaagtagacagcagcattctcagagacttctttaggatgtttgcagtaaactcacagagttgaacatacctttccgtaaagcagttttgaaaccctctgtttgtgggatctgcaagtggatatttggaccgctccgagacctttgctggaaatgggaatatcttcacatataaactagacagaagcattctcagaaacttcttggtgatgtgtgcattgtactcccaaatttgaatcttccttctcatggagcagttttgaaacactctgtgcaatctacaattggagaattggaacgcttggatgcccgtggtagaaaaggaaatatcctcatataaaaactagacagaaggattcacagaaaatgctttgtgatgtgtgcattcagatcacggagttgaatctttcttttgttagagcagttttgaaacactgtttctgtggaatctgccagcggacacttggagcgcttttagggctatggtggagaaggaaatatcttcacataaaaactagaaagaagcattctcagaaccatttatgtgaagcgtgcattcaactcacagagttgaaccttccttttgatagaacagttttgaaacactcttttgaacaattgcaggtgaatatttggagggctttgaagcctttgttggaaacgggaatatcttcacacacgaactagccagaagcattctcagaaacttctttgtgatgtgtgcgttgaacccagagagatgaaccattcctttgatagagcagttttgaaacgtgtttttgtaagatctgcaagcggatagttggcttcgctttgtgtcctttggtggaaacgggaatatcttctaataaaaactagacagaaatattctcacaatctcctttgtgatgtgggcattcaactaacacagttgaacatttcttttcacagagcagttttgagacactcttttggtagaatctgtcagtggatatttggagcgctttgagggttgttgtgccaatggaaatatctgcccctaaaatctagacagaagcattctcagaaactgcttcgtgatgtttgcattcaactcacagacttgaacatacctcttcatagagcagttttgaaaacctctttttgtagaatctgcaagtggatattcggaccacattgaggccttcataggaaacagtaatatcttcacataaaaactagatagaagcattgtcagaaagttctttgtgatgtgtgaattcaactcacagatttgaaccttcctttaatagagcagttttgaaacacactttttctagaatctgcaagtagatatttggagcgctttgaggccttcgttggaaaccggaatatcttcacaggaaaagtagatagaggcattctcagaaactttttcgtgatatgtggattcaactcacagcgttgaacctttcttttgatagagcagttttgtaaaactcttttatcgaatctgcaagtagacatttggagtgctttgagggctgtggtgcaaaaggaaatgtcttcccatagaaactagactgaagcattctcagcaacttcttggtgacgtttgcattcatctcacagtgttgaacatacctttccatagagtggttttgaaacactgtttttgtagaatcggcaagtggatatttggactgctttgaggccttcatcggaaacgggaatatcttctcataaacactagagagaagcattctcagaaacttctttgtgatctgcccattcaactcacagagttgaaccttcctttttatggagcagttttgaaacactgtttttggagaatctgcaagtggatatttggagcgctttgaggcctatggtagaaaaagaaatatctgcctctaaaaactagacagaagcattccgagaaacttctttgtgatgtttgcattcaactagcagagttgaaccttccttttgatagggcagtttggaaacactctttttgtagaagctgcatgtggatatctggagcggtttgaggcctacggtcaaaaaggaaatatcttcctgggaaaaatagacgaaagcattctcagaaagtgctttgtgatatgtgcattcgactcaccgagttgaaatttttttttgatagagcagttttgaaacactctgtagaatctgaaagtggatatttggagctctttgagggctatggcggcaaagaaactatattcacattaaagtagacagcagcattctcagaaacttctttaggatgtttgcagtaaagtcacagagttgaacatacctttccgtagagcagttttgaaacactctgtttgtgggatccgcaagtggatatttggaccgctttgagacctttgctggaaatgggaatatcttcacatataaactagacagaagcattctcagaaacttcttcgtgatgtgtgcattgtactcccaaatttgaatcttccttctcatggagcagttttgaaacacactgtttgtgcaatctacaattggagaattggaacgcttggatgcccgtggtagaaaaggaaatatcctcatataaaaactagacagaaggattcacagaaaatgctttgtgatgtgtgcattcaaatcacggagttgaatctttcttttgtcagagcagttttgaaacactgtttctgtgggatctgccagcggacacttggagcgctttgagggctgtggtggagaaggaaatatcttcccataaaaactagaaagaagcattctcagaaacatttatgtgaagcgtgcattcaactcacagagttgaaccttcctttggatacaacagttttgaaacactcttttgaacaattgcaggtgaatctttggagcgctttgaagcctttgttggaaatgggaatatcttcacacacaaactaaccagaagcattctcagaaacttctttgtgatgcgtgcgttgaacccagagagatgaacctttcctttgatagagcagttttgaaacgtgtttttgtaagatctgcaagcggataattggcttcgctttgtgtcctttggtgggaacgggaatatcttctaataaaaattagacagaaatattctcagaatcttctttgtgatgtgggcattcaactaacacagttgaacatttcttttcacagaacagttttgaaacactcttttgaacaattgcaggtgaatctttggagcgctttgaagcctttgttggaaataggaatatattcacaaacaaactagccagaagcatgctcagaaactacttcgtgatgtctgcattcaacacacagagttgaacatacctcttcacagagcagttttgaaaacctctttctgtagaatctgcaagtggatattcggaccactttgaggccttcataggaaacagtaatatcttcacataaaaactagatagaaagcattgtcagaaagttctttgtgatgtgtgaattcaactcacagagttgaaccttcctttaatagagcagttttgaaacactctttttctagaatctgcaagtagatatttggagcgctttgaggccttctttggaaaccggaatatcttcacataaaaagtagatagggcattctcagaaactttttcgtgatatgtggattcaactcacagcgttgaacctttcttttgatagagcagttttgtaaaactcctttatcgaatctgcaagtagacatttggagtgctttgggggctgtggtgcaaaaggaaatgtcttcccatagaaactagactgaagcattctcagcaacttctttgtgacgtttgctttcatctcacagtgttgaacatacctttccatagagtagttttgaagcactatttttgtagaatctgcaagtggatatttggactgctttgaggccttcatcggaaacgggaatatcttcacataaacactagacagaagcattctcagaaacttctttgtggtctgtccattcaactcacagagttgaaccttcctttttatggagcagttttgaaacactgttttcggaggatctgcaagtggatatttggagcactttgaggcctacggtagaaaaagaaatatctgcctatgacaactagacagaagcattccgagaaaagttctttgtgatgtttgcattcaactagcagagttgaaccttccttttgatagggcagtttggaaacactctttttgtagaatctgcatgtggatatctggagcggtttgaggcctacagtcaaaaaggaaatatcttcctgggaaaaatagacgaaagcattctcagaaactgctttgtgatatgcgcattcgactcaccgagttgaaacttttttttgatacagcagttttgaaacactctgtagaatctgaaagtggatatttggagctctttgagggctatggcggaaaagaaaatatattcacattaaagtagacagcagcattctcagaaacttctttaggatgtttgcagtaaactcacagagttgaacatacctttccgtagagcagttttgaaacactctgtttgtgggatccgcaagtggatatttggaccgctttgagacctttgctggaaatgggaatatcttcacgtataaactagacagaagcattttcagaaacttcttcgtgatgtgtgcattctactcccaaatttgaatcttccttctcatgaagcagttttgaaacactctgtttgtgcaatccacaattggatatttggaacgctttgatgcccgttgtagaaaaggtaatatcctcatataaaaactagacagaaggattcacagaaaatgctttgtgatgtgtgcattcaaatcacggagttgaatctttcttttgttagagcagttttgaaacactctttctgtggaatctgccagcggacacttggagcgctttgagggctgtggtggagaaggaaatatcttcccataaaaactagaaagaagcatactcagaaacatttatgtgaagcgtgcattcaactcacagagttgaaccttccttttgatacaacagttttgaaacactcttttgaacaattgcaggtgaatctttggagcgctttgaagcctttgttggaaatgggaatatcttcacacacaaactagccagaagcattctcagaaacttctttgtgatgtgtgcgttgaacccagagagatgaacctttcctttgatagagcagttttgaaacgtgtttttgtaagatcggcaagcggataattggcttcgctttgtgtcctttggtggaaacgcgaatatcttctaataaaaactagacagaaatattctcagaatctcctttgtgatgtgggcattcaactaacacagttgaacatttcttttcacagagcagttttgaaacactcttttggtagaatctgccagtggatatttggagcgcttggagggctattgtgccaatggaagtatctgcccctgaaaactatacagaagcattctcagaaactacttcgtgatgtttgcattcaactcacagagttgaacatacctcttcatagagcagttttgaaaacctctttctgtagaatctgtaagtggatattcggaccactttgaggccttcataggaaacagtaatatcttcacataaaaactagatagaagcattgtcagaaagttctttgtgatgtgtgaattcaactcacagagttgaactttcctttaatagagcagttttgaaacactctttttctagaatctgcaagtagatatttggagcgctttgaggccttcgttggaatccggaatatcttcacataaaacgtagatagaggcatgctcagaaacttttttgtcatatgtagattcaactcacagcgttgaacctttcttttgatagagcagttttgaaaaactcttttatcgaatctgcaagtagacatttggagtgctttgagggctcaggtgcaaaaggaaatgtcttcccatagaaactagactgaagctttctcagcaacttcttggtgacgtttgcattcatctcacagtgttgaacatacctttccatagagtagttttgaaacactgtttttgtagaatcggcaagtggatatttggactgctttgaggccttcatcggaaacgggaatatcttcacataaacactagagagaagcattctcagaaacttctttgtcatctgtccattcaactcacagagttgaaccttcctttttatggagcagttttgaaacactccttttggagaatctgcaagtggatatttggagcgatttgaggcctatggtagaaaaagaaatatctgcctctaaaaaccagacagaagcattccgagaaacttctttgtgatgtttgcattcaactagcagagttaaaacttccttttgatagggcagtttggaaacactctttttgtagaatctgcatgtggatatctggagcggtttgaggcctacggtcaaaaaggaaatatcttcctgggaaaaatagacgaaagcattctcagaaagtgctttgtgatatgcgcattcgactcaccgagttgaaacttttttttgatagagcagttttgaaacactctgtagaatctgaaagtggatatttggagcactttgagggctatggcggaaaagaaaatatattcacattaaagtagacagcagcattctcagaaacttctttaggatgtttgcagtaaactcacagagttgaacctacctttccgtagagcagttttgaaacactctgtttgtgggatccgcaaggggatatttggaacgctttgagacctttgctggaaatgggaatatcttcacatataaactagacagaagcattctcagtaaacttcttcgtgatgtgtgcattctactcccaaatttgaatcttccttttcatgaagcagttttgaaacactctgtttgtgcaatccacaattggataattggaacgctttgatgcccatggtagaaaaggaaatatcctcatataaaaactagacagaaggattcacagaaaatgctttgtgatgtgtacattcaaatcacggagttgaatctttcttttgtcagagcagttttgaaacactgtttctgtggaatctgccagcggacacttggagcgctttgagggctgtggtggagaaggaaatatcttcccataaaaactagaaagaagcattctcagaaccatttatgtgaagcgtgcattcaactcacagagttgaaccttccttttgatagaacagttttgaaacactcttttgaacaattgcaggtgagtatttggagggctttgaagcctttgttggaaatgggaatatcttcacacacaaactagccagaagcattctcagaaacttctttgtgatgtgtgcattgaacccagagagatgaacctttcctttgatagagcagttttgaaacgtgtttttgtaagatctgcaagcggatagttggcttcgctgtgtgtcctttggtggaaacgggaatatcttctaataaaaactagacagagatattctcagaaacttctttgtgatgtgggcattcaactaacacagttgaacatatcttttcacagagaagttttgaaacactcttttggtcgaatctgccagtggatatttggagcgctttgagggctattgtgccaatggaaatatctgcccctaaaaactagacagaaacattctcagaaactgctttgtgatgtttgcattcaactcacacaggtgaacatacctcttcatagagcagttttgcaaacctctttttgtagaatctgcaagtggatattcggaccactttgaggccttcataggaaacagtaatatcttcacataaaaactagacagaagcattgtcagaaagttctttgtgatgtgtgaattcaactcacagagttgaaccttcctttaatagagcagttttgaaactctctttttgtagaatctgcaagtagatatttggagcgctttgaggccttctttggaaaccggaatatcttcacataaaaagtagatagaggcattctcagaaactttttcgtgatatgtggattcaactcacagcgttgaacctttcttttgatagagcagttttgtaaaactcttttatcgaatctgcaagtagacatttggagtgctttgggggctgtggtgcaaaaggaaatgtcttcccatagaaactagactgaagcattctcagcaacttcttggtgacgtttgcattcgtctcacagtgttgaacatacctttccatagagtggttttgaaacactgtttttgtagaatcggcaagtggatatttggactgctttgaggccttcatcggaaacgggaatatcttcacataaacactagagagaagcattctcagaaacttctttgtcatctgtccattcaactcacagagttgaaccttcctttttatggagcagttttgaaacactccttttggagaatctgcaagtggatatttggagcgctttgaggcctatggtagaaaaagaaatatccgcccctaaaaaccagacagaagcattctgagaaacttctttgtgatgtttacattcaactaccagagttgaaccttccttttgatagggcagtttggaaacactctttttgtagaatctgcatgtggatatctggagcgatttgaggcctacggtccaaaaggaaatatcttcctgggaaaaatggacgaaagcattctcagaaactgctttgtgatatgtgcattcaactcaccgagttgaaactttttttggatagagcagttttgaaacactctgtagaatctgaaagtggatatttggagctctttgagggctatggtggaaaagaaaatatattcacattaaactatacagcagcattctcagaaacatctttaggatgtttgcagtaaactcatagagttcaacatacctttccgtagagcagctttgaaacactctgtttgtgggatccgcaagtggatatttggaccgctttgagacctttgctggaaatgggaatatcttcacatataaactagacagaagcattctcagaaacttcttcgtgacgtgtgcattgtactcccaaatttgaatcttccttctcatggagcagttttgaaacactctgtttgtgcaatctacaattggagaattggaaggcttggatgcccatggtagaaaaggaaatatcctcatataaaaactagacagaaggattcacagaaaatgctttgtgatgtgtgcattcaaatcacggggttgaatctttcttttgttagagcagttttgaaacactgtttctgaggaatctgccagcggacacttggagcgctttgagggtcatggtggagaaggaaatatctttccataaaaactagaaagaagcattctcagaaacatttatgtgaagcgtgcattcaactcacagagttgaaccttccttttgatacaacagttttgaaacactcttttgaacaattgcaggtgaatcttcggagcgctttgaagcctttgttggaaatgggaatatcttcacacacaaactagccagaagcattctcagaaacatctttgtgatgtgtgcgttgaacccagagagatgaacctttcctttgatagagcagttttgaaacgtgtttttgtaaggtctgcaagcggataatgggcttcgctttgtgtcctttggtggaaacgggaatatcttctaataaaaactagacagaaatattctcagaatcttctttgtgatgtgggcattcaactaacacagttgaacgtttcttttcacagagcagttttgaaacactcttttggtagaatctgccagtggatatttggagcgctttgagggctattgtgccaacggaaatatctgcccctaaaaactagacagaagcattctcagaaactacttcgtgatgtttgcattcaacacacagagttgaacatacctcttcacagagcagttttgaaaacctctttctgtacaatctgcaagtggatattcggaccactttgaggccttcataggaaacagtaatatctttgcataaaaactagatagaagcattgtcagaaagttctttgtgatgtgtgaattcaactcacagagttgaaccttccttcaatagagcagttttgaaacactctttttccagaatctgcaagtagatatttcgagcgctttgaggccttcgttggaaaccggaatatcttcacaggaaaagtagatagaggcattctcagaaacttttttgtgatatgtagattcaactcacagcgttgaacctttttttggatggagcagttttgaaaaactcttttatcgaatctgcaggtagacatttggggtgctttgagggctgtggtgcaaaaggaaatgtcttcccatagaaactagactgaagcattctcagcaacttcttggtgacgtttgcattcatctcacagtgttgaacatacctttccatagagtggttttgaaacactgtttttgtagaatcggcaagtggatatttggactgctttcaggccttcatcacaaacgggaatatcttcacataaacactagagagaagcattctcagaaacttctttgtcatctgtccattcaactcacagagttgaaccttcctttttctggagcagttttgaaacactctttttcgagaatctgcaagtggatatttggagcgctttgaggcctatggtagaaaaagtaatatctgcctctaaaaaccagacagaagcattctgagaaacttctttgtgatgtttgccttcaactaccagagttgaaccttccttttgatagggcagtttggaaacactctttttgtagaatctgcatgtggatatctggagcgatttgaggcctacggtccaaaaggaaatatctgcctgggaaagatagacgaaagcattctcagaaagtgctttgtgatatgtgcattcgactcaccgagttgaaacttttttttgatagagcagttttgaaacactctgtagaatctgaaagtggatatttggagctctttgagggctatggcggaaaagaaaatatattcacattaaggtagacagcagcattcttagaaacttctttaggatgtttgcagtaaactcacagagttgaacctacctttccgtagagcagttttgaaacactctgtttgtgggatccgcaagtggatatttggaccgctttgagacctttgctggaaatgggaatatcttcacatataaactaggcagaagcattctcagaaacttcttcgtgatgtgtgcattctactcccaaatttgaatcttccttttcatgaagcagttttgaaacactcggtttgtgcaatccacaattggataattggaacgctttgatgcccatggtagaaaaggaaatatcctcatataaaaactagacagaaggattcacagaaaatgctttgtgatgtgtgcattcaaatcacggagttgaatctttcttttgtcagagcagttttgaaacactgtttctgtggaatctgccagcggactcttggagctctttgagggctatggtggagaaggaaatatcttcccataaaaagtagaaagaagcattctcagaaacatttatgtgaagcgtgcattcaactcacagagttgaaccttccttttgatacaacagttttgaaacactcttttgaacaattgcaggtgaatctttggagcgctttgaagcctttgttggaaatgggaatatattcacacacaaactagccagaagcattcccagaaacttctttgtgatgtgtgcgttgaacccagagagatgaacctttcctttgatagagcagttttgaaacgtgtttttgtaagatcggcaagcggataattggcttcgctttgtgtcctttggtggaaacgggaatatcttctaataaaaactagacagaaatattctcacaatctcctttgtgatgtgggcattcaactaacacagttgaacatttcttttcacagagcagttttgagacactcttttggtagaatctgccagtggatatttggagcgctttgagggctgttgtgccaatggaaatatctgcccctaaaatctagacagaagcattctcagaaactgttttgtgatgtttgcattcaactcacagaggtgaacatacctcttcatagagcagttttgcaaacctctttttgtagaatctgcaagtggatattcggaccactttgaggccttcataggaaacagtaatatcttcacataaaaactagatagaagcattgtcagaaagttctttgtgatgtgtgaattcaactcacagagttgaaccttcctttaatagagcagttttgaaacactctttttctagaatctgccagtagatatttggagcgctttgaggccttcgttggaatccggaatatcttcacataaaaagttgatagaggcattctcagaaacttttttgtgatatgtagattcaactcacagcgttgaacctttctttggatggagcagttttgacaaacccttttatcgaatctgcaggtagacatttggggtgctttgagggctgtggtgcaaaaggtaatgtcttcccatagaaactagactgaagcattctcagcaacttcttggtgacgtttgcattcatctcacaagtgttgaacatacctttccatagagtagttttgaaacactgtttttgtagaatcggcaagtggatatttggactgctttgaggccttcatcggaaacgggaatatcttcacataaacactagagagaagcattctcagaaactactttgtgatctgtccattcaactcacagagttgaaccttcctttttatggagcagttttgaaacactgtttttggagaatctgcaagtggatatttggagcgcttttaggcctatggtagaaaaagaaatatctgcctattacaactagactgaagcattctgtgaaacttctttgtgatgtttgccttcaactaccagagttgaaccttccttttgatagggcagtttggaaacactctttttgtagaatctgcatgtggatatctggagcgatttgaggcctacggtccaaaaggaaatatcttcctgggaaagatagacgaaagcattctcagaaactgctttgtgacatgtgcattcgactcaccgagttgaaactttttttggatagagcagttttgaaacactctgtagaatctgaaagtggatatttggagctctttgagggctatggcggaaaagaaaatatattcacattaaactagacagcagcattcccggaaacttctttaggatgtttgcagtaaactcacagagttgaacatacctttccgtagagcagttttgaaacactctgtttgtgggatccgcaagtggatatttggaccgctttgagacctttgctggaaacgggaatatcttcacatataaactagacagaagcattctcagaaacttcttcgtgatgtgtgcattctactcccgaatttgaatcttccttttcatgaagcagttttgaaacactctgtttgtgcaatccacaattggataaatggaacgctttgatgcccatggtagaaaaggaaatatcctcatataaaaactagacagaaggattcacagaaaatgctttgtgatgtgtgcattcaaatcacagagttgaatctttcttttgttagagcagttttgaaagactgtttctgtggaatctgccagcggacacttggagcgctttgagggctacggtggagaaggaaatatcttcacataaaaactagaaagaagcattctcagaaacatttatgtgaagcgtgcattcaactcacagagttgaaccttcctttggatacaacagttttgaaacactcttttgaacaattgcaggtgaatctttggagcgctttgaagcctttgttggaattgggaatatcttcacacacaaactagccagaaacattctcagaaacttctttgtgatgtgtgcgttgaacccagagagatgaacctttcctttgatagagcagttttgaaacgtgtttttgtaagatctgcaagcggatagttggcttcgctttgtgtcctttgttggaaacgggaatatcttctaataaaaactagacagaaatattctcagaatcttcttcgtgatgtgggcattcaactaacacagttgaacctttcttttcacagagcagtttggaaacacccttttggtagaatctgccagtggatatttggagcgctttgagggctattgtgccaacggaaatatctgcccctaaaaactagacagaagcattctcagaaactgctctgtgatgtttgcattcaactcacagagttgaacatacctcttcatagagcacttttggaaacctctttttgtagaatctgcaaggggatattcggaccactttgaggccttcataggaaacagtaatatcttcacataaaaactagatagaagcattgtcagaaagttctttgtgatgtgtgaattcaactcacagagttgaaccttccttcaatagagcagttgtgaaacactctttttctagaatctgcaagtggatacttggagcgctttgaggccttcgttggaaaccggaatatcttcacaggaaaagtagatagaggcattctcagtaaacttttttgtgatatgtagattcaactcacagcgttgaacctttctttggatggagcagttttgaaaaactcttttatcgaatctgcaggtagacatttggggtgctttgagggctgtggtgcaaaaggaaatgtcttcccatagaaactagactgaagcattctcagcaacttctttgtgacgtttgcattcatctcacagtgttgaacatacctttccatagagtagttttgaaacactgtttttgtagaatctgcaagtggatatttggactgctttgaggccttcatcggaaacgggaatatcttcacataaacactagacagaagcatcctcagaaacttctttgtcatctgtccattcaactcacagatttgaaccttcctttttctgcagcagttttgaaacactctttttggagaatctgcaagtggatatttggagcgctttgaggcctatggtagaaaaagaaatatctgcctctaaaaaccagacagaaagcattccgagaaacttctctgtgatgtttgcattcaactagcagagttgaaccttccttttgatagggcagtttggaaacactctttttgtagaatctgcatgtggatatctggagcggtttgaggcctacggtcaaaaaggaaatatcttcctgggaaaaatagacaaaagcattctcagaaactgctttgtgatatgggcattcgactcaccgagttgaaacttttttttgatagagcagttttgaaacactctgtagaatctgaaagtggatatttggagctctttgagggctatggcggaaaacaaaatatattcacattaaagtagacagcagcattcccagaaacttctttaggatgtttgcagtaaactcacagagttgaacatacctttccgtagagctgttttgaaacactctgtttgtgggatccgcaagtggatatttggaccgctttgagacctttgctggaaacgggaatatcttcacatataaactagacagaagcattctcagaaacttcttcgtgatgtgtgcattctactcccaaatttgaatcttccttttcatgaagcagttttgaaacactctatttgtgcattctacaattggatgattggaacgctttgatgcccatggtagaaaaggaaatatcctcatataaaaactaggcagaaggattcacagaaaatgctttgtgatgtgtgcattcagatcacggagttgaatctttcttttgttagagcagttttgaaacactgtttctgtggaatctgccagcggacacttggagcgctttgagggctatggtggagaaggaaatatcttcacataaaaactagaaagaagcattctcagaaccatttatgtgaagcgtgcgttcaactcacagagttgaaccttccttttgatagaacagttttgaaacactcttttgaacaattgcaggtgaatatttggagggctttgaagccttttttggaaatgggaatatcttcacacacaaactagccagaagcattctcagaaacttctttgtgatgtgtgcgttgaacccagagagatgaacctttcctttgatagagctgttttgaaacgtgtttttctaacatctgcaagcggataattggcttcgcgttgtgtcctttggtggaaacgggaatatcttctaataaaaactagacagaaatattctcagaatcttctttgtgatgtgggcattcaactaacacagttgaacgtttcttttcacagagcagttttgaaacactcttttggtagaatctgccagtggatatttggagcgctttgagggctattgtgccaatggaaaatctgcccctaaaaactagacagaagcattctcagaaactacttcgtgatgtttgcattcaactcacagagttgaacatacctcttcacagagcagttttgaaaacctctttttgtagaatctgcaagtggatattcggagcactttgaggccttcataggaaacagtaatgtcttcgcataaaaactagatagaagcattgtcagaaagttctttgtgatgtgtgaattcaactcacagagttgaaccttcctttaatagagcagttttgaaacactctttttctagaatctgcgagtagatatttggagcgctttgaggccttcgttggaaaccggaatatcttcacatagaaagtagatagaggcattctcagaaacttttttgtgatatgtagattcaactcacagcgttgaacctttctttggatggagcagttttgaaaaactcttttatcgaatctgcaggtagacatttggggtgctttgagggctgtggtgcaaaaggaattgtcttcccatagaaactagactgaagcattctcagcaacttcttggtgacgtttgcattcatctcacagtgttgaacatacgtttccatagagtggttttgaaacactgtttttgtagaatcggcaagtggatatttggactgctttgaggccttcatcggaaacgggaatatcttcacataaacactagagagaagcaatctcagaaacttctttgtgatctgtccgttcaactcacagagttgaaccttcctttttatggagcagttttgaaacactgtttgtggagaatctgcaagtggatatttggagcgccttgaggccaatggtagaaaaagaaatatctgcctctaaatactagactgaagcattccgagaaactcctttgtgatgtttgcattcaactagcagagttgaaccttccttttgatagggcagtttggaaacactctttttgtagaatctgcatgtggatatctggagcggtttgaggcctacggtcaaataggaaatatcttcctgggaaaaatagacgaaagcattctcagaaactgctttgtgatatgtgcattcgactcaccgagttgaaactattttttgatagagcagttttgaaacactctgtagaatctgaaagtggatatttggagctctttgagggctatggcggaaaagaaaatatattcacattaaagtagacagcagcattctcagaaacttctttaggatgtttgcagtaaactcagagagttgaacataccttacggtagagtagttttgaaacactctgtttgtgggatcctcaagtggatatttggaccgctttgagacctttgctggaaatgggaatatcttcacatataagctagacagaagcattctcagaaacttcttggtgatgtgtgcattgtactcccaaatttgaatcttccttctcatggagcagttttgaaacactctgtttgtgcaatctacaattggagaattggaatgcttggatgcccgtggtagaaaaggaaatatcctcatataaaaactagacagaaggattcacagaaaatgctttgtgatgtgtgcattcaaatcacggagttgaatctttctttcgttagagcagttttgaaacactgtttctgtggaatctgccagcggacacttggagcgctttgagagctatggtggagaaggaaatatcttcacataaaaactagaaagaagcattctcagaaacatttatgtgaagcgtgcattcaactcacggagttgaaccttccttttgatacaacagttttgaaacactctttggaacaattgcaggtgaatctttggagcgctttgaagcctttgttgcaaatgggaatatcttcacacacaaactagccagaagcattcccagaaacttctttgtgatgtgtgcgttgaacccagagagatgaacctttcctttgatagagcagttttgaaacgtgtttttgtaagatctgcaagcggataattggctttgctttgtgtcccttggtgaaaacgggaatatcttctaataaaaactagacagaaatattctcagaatctcctttgtgatgtgggcattcaactaacacagttgaacatttcttttcacagagcagttttgaaacactcttttggtagaatctgccagtggatatttggagcgcttggagggctattgtgccaatggaaatatctgcccctgaaaactggacagaagcattctcagaaactacttcgtgatgtttgcattcaacacacagagttgaacatacctcttcacagagcagttttgaaaacctctttctgtagaatctgcaagtggatattcggaccactttgaggccttcataggaaacagtaatatcttcacataaaaactggatagaagcattgtcaggaagttctttgtgatgtgtgaattcaactcacagagttgaaccttcctttaatagagcagttttgaaacactctttttctagaatctgcaagtagatatttggagcgcttggaggccttctttggaaaccggaatatcttcaaaggaaatgtagatagaggcattctcagaaacattttttgtgatatgtagactcaactcacagcgttgaacctttctttggatggagcagttttgaaaaactcttttatcgaatctgcaggtagacatttggggtgctttgagggctgtggtgcaaaaggaaatgtcttcccatagaaactagactgaagcattctcagcaacttctttgtgacgtttgcattcatctcacagtgttgaacatacctttccatagagtagttttgaaacactgtttttgtagaatcggcaagtggatatttggactgctttgaggccttcatcggaaacgggaatatcttcacataaacgctagagagaagcattctcagaaacttctttgtgatctgtccattcaactcacagagttgaaccttcctttttctggagcagttttgaaacactgttcttggagaatctgcaagtggatatttggagcgctttgaggcctgtggtagaaaaagaaatatctgcctctaaaaactagacagaagcattccgagaaacttctctgtgatgtttgcattcaactagcagagttgaaccttccttttgatagggcagtttggagacactctttttttagaatctgcatgtggatatctggagcggtttgaggcctacggtcaaaaaggaaatatcttcctgggaaaaatagacgaaagcattctcagaaactgctttgtgatatgtgcattcgactcaccgagttgaaacttttttttgatagagcagttttggaacactctgtagaatctgaaagtgtagatttggagctctttgagggctatggcggagaagaaaatatattcacattaaactagacagcagcattcccagaaacttctttaggatgtttgcagtaaactcacagagttgaacatacctttccgtagagcagttttgaaacactctgtttgtgggatccgcaagtggatatttggaccgctttgagacctttgctggaaacgggaatatcttcacatataaactagacagaagcattctcagaaacttcttcgtgatgtgtgcattctactcccgaatttgaatcttccttttcatgaagcagttttgaaacactctgtttgtgcaatccacagttggataattggaaggctttgatgcccatggtagaaaaggaaatatcctcatataaaaactagacagaaggattcacagaaaatgctttgtgatgtgtgcattcaaatcacggagttgaatctttcttttgtcagagcagttttgaaaaaatgtttctgtggaatctgccagcggacacttggagcgctttgagggctatggtggagaaggaaatatcttcccataaaaactagaaagaagcattctcagaaccatttatgtgaagcgtgcattcaactcacagagttgaaccttccttttgatagaacagttttgaaacactcttttgaacaattgcaggtgaatatttggagggctttgaagcctttgttggaaatgggaatatcttcacacacaaactagccagaagcattctcagaaacttctttgtgatgtgtgcgttgaacccagagagatgaacctttcctttgatagagcagttttgaaacttgtttttgtaagatcggcaagcggataattggcttcgctttgtgtcctttggtggaaacgggaatatcttctaataaaaactagacagaaatattctcagaatcttatttgtgatgtaggcattccactaacacagttgaagatttcttttcatagagtagttttgaaacactcttttggtagaatctgccagtggatatttggagcgctttgagggctattgtgccaatggaaatatcttcccctgaaaactagacagaagcattctcagaaactacttcgtgatgtttgcattcaactcacagagttgaacatacctcttcatagagcagttttgaaaacctctttctgtagaatctgcaagtggatattcggaccactttgaggccttcataggaaacagtaatatcttcacataaaaactagatagaagcattgtcagaaagttctttgtgatgtgtgaattcaactcacagtagttgaaacttcctttaatagagcagttttgaaacactctttttctggaatctgcaagtagatatttggagcgctttgaggccttcgttggaaaccggagtatcttcacaggaaaagtagataggggcattctcagaaacttgttttgtgatatgtagattcaactcacagcgttgaacctttctttggatggagcagttttgaaaacctcttttatcgaatctgcaggtaaacatttggggtgctttgagggctgtggtgcaaaaggaaatgtcttcccatagaaactagactgaagcattctcagaaactactttgtgacgtttgcattcatctcacagtgttgaacatacctttccatagagtagttttgaagcactatttttgtagaatctgcaagtggatatttggactgctttgaggccttcatcggaaacgggaatatcttcacataaacactagacagaagcattctcagaaacttctttgtgatctgtccattcaactcacagagttgaaccttcctttttatggagtagttttgaatcactgtttttggagaatctgcaagtggatatttggagcgctttgaggcctatggtagaaaaagaaatatctgcctctaaaaaccagacagaagcattccgagaaacttctctgtgatgtttgcattcaactagcagagttgtaccttccttttgatagggcagtttggaaacactctttttgtagaatctgcatgtggatatctggagcggtttgaggcctacggtcaaaaaggaaatatcttcctgggaaaaatagacgaaagcattctcagaaactgctttgtgatatgggaattcgactcaccgagttgaaacttttttttgatagagcagttttgaaacactctgtagaatctgaaagtggatatttggagctcttgcagggctatggcggaaaagaaaatatattcacattaaagtagacagcagcattctcagaaacttctttaggatgtttgcagtaaactcacagagttgaacctacctttctgtagagcagttttgaaacactctgtttgtgggatccgcaagtggatatttggaccgctttgagacctttgctggaaatgggaatatcttcacatataaactagacagaagcattctcagaaacttcttcatgatgtgtgcattctcctcccgaatttgaatcttccttttcatgaagcagttttgaaacactctgtttgtgcaatccacaattggataattggaacgctttgatgcccatggtagaaaaggaaatatcctcatataaaaactagacagaaggattcacagaaaatgctttgtgatgtgtgcattcaaatcacggagttgaatctttcttttgttagagcagttttcaaacactgtttctgtggaatctgccagcggacacttggagcgctttgagggctgtggtggagaaggaaatatcttcccataaaaactagaaagaagcattctcagaaacatttatgtgaagcgtgccttcaactcacagagttgaaccttccttttgatacaacagttttgaaacactctttggaacaattgcaggtgaatctttggagcgctttgaagcctttgttggaaatgggaatatcttcacacacaaactagccagaagcattctcagaaacttctttgtgatgtgtgcgttgaacccagagagatgaacctttcctttgaaagagcagttttgaaacgtgtttttgtaagatctgcaagcggatagttggcttcgctttgtgtcctttggtggaaacgggaatatcttctaataaaaactagacagaaatattctcagaatcttctttgtgatgtgggcattcaactaacacagttgaacctttcttttcacagagcagttttgaaacactcttttggtagaatctgccagtggatatttggagcgctttgagggctattgtgccaacggaaatatctgcccctaaaaactagacagaagcattctcagaaactacttcgtgatgtttgcattcaactcacagagttgaacatacctcatcacagagcagttttgaaaacctctttttgtagaatctgcaagtgtatattcggagcactttgaggccttcataggaaacagtaatatcttcgcataaaaactagatagaagcattgtcaggaagttctttgtgatgtgtgaattcaactcacagagttgaaccttcctttaatagagcagttttgaaacactctttttctagaatctgcaagtagatatttggagcgcttagaggccttctttggaaaccggaatatcttcacaggaaatgtagatagaggcattctcagaaacattttttgtgatatgtagattcaactcacagcgttgaacctttctttggatggagcagttttgaaaaactcttttatcgaatctgcaggtagacatttggggtgctttgagggctgtggtgcaaaaggaaatgtcttcccatagaaactagactgaagcattctcagcaacttctttgtgacgtttgcattcatctcacagtgttgaacatacctttccatagagtagttttgaaatactgtttttgtagaatcggcaagtggatatttggactgctttgaggccttcatcggaaacgggaatatcttcacataaacactagagagaagcattctcagaaacttctttgtgatctgtccattcaactcacagagttgaaccttcctttttatggagcagttttgaaacactccttttggagaatctgcaggtggatatttggagcgctttgaggcctatggtagaaaaagaaatatctgcctctaaaaaccagacagaagcattctgagaaacttctttgtgatgtttgccttcaactaccagagttgaaccttccttttcatagggcagtttggaaacactctttttgtagaatctgcatgtggatatctggagcgatttgaggcctacggtccaaaaggaaatatcttcctgggaaagatagacgaaagcattctcagcaactgctttgtgatatgtgcattcgactcaccgagttgaaacttttttttgatagagcagttttgaaacactctgtagaatctgaaagtggatatttggagatctttgagggctatgtcggaaaagaaaatatattcacattaaagtagacagcagcattcccagaaacttctttaggatgtttgcagtaaactcacagagttgaacatacctttccatagagcagctttgaaacactctgtgtgtgggatccgcaagtggatatttggaccgctttgagacctttgctggaaacgggaatatcttcaaatataaactggacagaagcattctaagaaacttcttcttgatgtgtgcattctactccagaatttgaatcttccttctcatgaagcagttttgaaacactctatttgcgcaatctacaattggataattggaacgctttgatgcccatggtagaaaaggaaatatcctcatataaaaactagacagaaggattcacagaaaatgctttgtgatgtgtgcattcaaatcacggagttgaatctttcttttgttatagcagttttgaaacactgtttctgtggaatctgccagcggacacttggagcgctttgagggctgtggtggagaaggaaatatcttcccataaaaactagaaagaagcattctcagaaccatttatgtgaagcgtgcgttcaactcacagagttgaaccttccttttgacagaacagttttgaaacactcttttgaacaattgcaggtgaatatttggagggctttgaagcctttgttggaaatgggaatatcttcacacacaaactagccagaagcattctcagaaacttctttgtgatgtgtgcgttgaacccagagagatgaacctttcctttgacagagcagttttgaaacgtgtttttgtaagatctgcaagcggatagttggcttcgctgtgtgtcctttggtggaaacgggaatatcttctaataaaaactagacagaaatattctcagaatctcctttgtgatgtgggcattcaactaacacagttgaacatttcttttcacagagcagttttgaaacactcttttggtagaatctgccagtggatatttggagcgcttggaggactattgtgccaatggaaatatctgcccctgaaaactggacagaagcattctcagaaactaattcgtgatgtttgcattcaacacacagagttgaacatacctcttcacagagcagttttgaaaacctctttctgtagaatctgcaagtggatattcggaccactttgaggccttcataggaaacagtaatatcttcacataaaaactagatagaagcattgtcagaaagttccttgtgatgtgtgaattcaactcacagagttgaaccttcctttaatagagcagttttgaaacactcttcttctagaatctgcaattagatatttggagcgctttgaggccttcattggaaaccggaatatcttcacagaaaaagtagatagaggcattctcagaaacttttttgtgatatgtagattcaactcacagcgttgaacctttctttggatggagcagttttgaaaaacccttttatcgaatctgcaggtagacatttggggtgctttgagggctgtggtgcaaaaggaaatgtcttcccatagaaactagactgaagcattctctcaacttctttgtgacgtttgcattcatctcacagtgttgaacatacctttccatcgagtacttttgaaacactgtttttgtagaatctgcaagtggatatttggactgctttgaggccttcatcggaaacgggaatatcttcacataaacactagagagaagcattctcagaaacttctttgtcatctgtccattcaactcacagagttgaaccttcctttttatggagcagttttgaaacactccttttggagaatctgcaagtggatatttggagcgctttgaggcctatggtagaaaaagaaatatctgcctctgaaaaccagacagaagcattccgagaaacttctttgtgatgtttgcattcaactagcagagttgaacttccttttgatagggcagtttggagacactctttttgtagaatctgcatgtggatatctggagcggtttgaggcctacggtcaaaaaggaaatatcttcctgggaaaaatagacgaaagcattctcagaaactgctttgtgatatgtgcattcgactctccgagttgaaacttttttttgatagagcagttttgaaacactctgtagaatctgaaagtggatatttggagctcttcgagggctatggcggaaaagaaaatgtattcacattaaactagacagcagcattcccagaaacttctttaagatgtttgcagtaaactcacagagttgaacatacctttccgtagagcagctttgaaacactctgtgtgtgggatccgcaagtggatatttggaccgctttgagacctttgctggaaacgggaatatcttcacatataaactggacagaagcattgtcagaaacttcttcgtgatgtgtgcattctactcccgaatgtgaatcttccttttcatgaagcagttttgaaacactctgtttgtgcaatccacaattggataattggaacgctttgatgcccatggtagaaaaggaaatatcttcatataaaaactagacagaaggattctcagaaaatgctttgtgatgtgtgcattcaaatcacggagttgaatctttcttttgttagagcagttttgaaacactgtttctgtggaatctgccagcggacacttggagcgctttgagggctatggtggagaaggaaatatcttcacataaaaactagaaagaagcattctcagaaccatttatgtgaagcgtgcattcaactcacagagttgaaccttccttttgatagaacagttttgaaacactcttttgaacaattgcaggtgaatatttggagggctttgaagcctttgttggaaatgggaatatcttcacacacaaactagccagaagcattctcagaaacttctttgtgatgtgtgcgttgaacccagagagatgaacctttccttggatagagcagttttgaaacgtgtttttgtaagatcggcaagcggataattggcttcgctttgtgtcctttggtggaatcgggaatatcttctaataaaaactagacagaaatattctcagaatctcctttgtgatgtgggcattcaactaacacagttgaacatttcttttcacagagcagttttgaaacactcttttggtagaatctgccagtggatatttggtgcgcttggagggctattttgccaatggaaatatctgcccctgaaaactagacagaagcattctcagaaactacttcgtgatgtctgcattcaacacacagagttgaacatacctcttcacagagcagttttgaaaacctctttctgtagaatctgcaagtggatattcggaccactttgaggccttcgtaggaaacagtattatcttcacataaaaactagatagaagcattgtcagaaagttctttgtgatgtgtgaattcaactcacagagttgaaccttcctttaatacagcagttttgaaacactctttttctagaatctgcaagtagatatttggagcgctttgaggccttcgttggaaaccggaatatcttcacaggaaaagtagatagaggcattctcagaaactttttcgtgatatgtggattcaagtcacagcgttgaacctttcttttgatagagcagttttgtaaaactcctttatcgaatctgcaagtagacatttggagtgctttgggggctgtggtgcaaaaggaaatgtcttcccatagaaagtagactgaagcattctcagcaacttcttggtgacgtttgcattcatctcatagtgttgaacatacctttccatagagtggttttgaaacactgtttttgtagaatcggcaagtggatatttggactgctttgaggccttcatcggaaacgggaatatcttcacataaacactagagagaagcattctcagaaactactttgtgatctgtccattcaactcacagagttgaaccttcctttttatggagcagttttgaaacactgtttttggagaatctgcaagtggatatttggagcgctttgaggcctatggtagaaaaagaaatatctgcctattacaactagacagaagcattctcagaaacttctttgtgatgtttgcattcaactaccagagttgaaccttccttttgatagggcagtttggaaacactctttttgtagaatctgcatgtggatatctggagcgatttgaggcctacggtccaaaaggaaatatcttcctgggaaaaatagacgaaagcattctcagaaactgctttttgatatgtgcattcgactcaccgatttgaaactttttttggatagagcagttttgaaacactctgtagaatttgcaagtgtatatttggagctctttgagggctatggcggaaaagaaaatatattcacattaaactagacagcagcattcccagaaacttctttaggatgtttgcagtaaactcacagatttgaacatacctttccgtagagcagctttgaaaaactctgtttgtgggatccgcaagtggatatttggaccgctttgagacctttgctggaaacgggaatatcttcacatataaactggacagaagcattctcagaaacttcttcgtgatgtgcgcattctactcccaaatttgaatcttccttctcatgaagcagttttgaaactctctatttgtgcaatctacaattggataattggaaccctttgatgcccatggtagaaaaggaaatatcctcatataaaaactagacagataaggattcacagaaaatgctttgtgatgtgtgcattcaaatcacggagttgaatctttcttttgttagatcagttttgaaacactgtttctgtggaatctgccagcggacacttggagcgctttgagggctatggtggagaaggaaatatcttcacataaaaactagaaagaagcattctcagaaccatttatgtgaagcgtgccttcaactcacagagttgaaccttccttttgatagaacagttttgaaacactcttttgaacaattgcaggtgaatatttggagggctttgaagcctttgttggaaatgggaatatcttcacacacaaactagccagaagcattctcagaaacttctttgtgatgtgtgcgttgaacccagagagatgaacctttcctttgaaagagcagttttgaaacgtgtttttgtaagatctgcaagcggatggttggcttcgctttgtgtcctttggtggaaacgggaatatcttctaataaaaactagacagaaatattctcagaatcttctttgtgatgtgggcattcaactaacagagttgaacgtttcttttgacagagcagttttgaaacactcttttggtagaatctgccagtggatatttggagcgctttgagggctattgtgccaacggaaatatctgcccctaaaaactagacagaagcattctcagaaactgctttgtgatgtttgcattcaactcacagaggtgaacatacctcttcatagagcagttttgcaaacctctttttgtagaatctgcaagtggatattcggaccactttgaggccttcataggaaacagtaatatcttcacataaaaactagatagaagcattgtcagaaagttctttgtgatgtgtgaattcaactcacagagttgaaccttcctttaatagagcagttttgaaacactctttttctagaatctgcaagtagatacttggagcgctttgaggccttctttggaaaccgggaatatcttcacataaaaagtagatagaggcattctcagaaactttttgtgatatgtagattcaactcacagcgttgaacctttctttggatggagcagttttgaaaaactcttttatcgaatctgcaggtagacattcggggtgctttgagggctgtggtgcaaaaggaaatgtcttcccatagaaactagactgaagcattctcagcaacttcttggtgacgtttgcattcatctcacagtgttgaacatacctttccatagagtggttttgaaacactgtttttgtagaatgggcaagtggatatttggactgctttgaggccttcatcggaaacgggaatatcttcacataaacactagagagaagcattctcagaaacttctttatcatctgtccattcaactcacagagttgaaccttcctttttatggagcagttttgaaacactccttttggagaatctgcaagtggatatttggagcgctttgaggcctatggtagaaaaagaaatatctgcctctaaaaacaagacagaagcattctcacaaagtgctttgtgatatgtgcattcgactcaccgagttgaaacttttttatgatagagcagttttgaaacactctgtagaatctgaaagtggatatttggagctcttcgagggctatggcggaaaagaaaatatattcacattaaactagacagcagcattctcagaaacatctttaggatgtttgcagtaaactcacagagttgaacatacctttccgtaaagcagttttgaaaccctctgtttgtgggatctgcaagtggatatttggaccgctttgagacctttgctggaaatgggaatatcttcacatataaactagacagaagcattctcagaagcttcttcgtgatgtgtgtattctactcccaaatttgaatcttccttttcatgaagcagttttgaaacactctgtttgtacaatccacaattgcataattggaacgctttgatgcccatggtagaaaaggaaatatcctcatataaaaactagacagaaggattcacagaaaatgctttgtgatgtgtgcattcaaatcacggagttgaatctttcttttgttagagcagttttgaaacactgtttctgtggaatctgccagcagacacttggagcgctttgagggctatggtggagaaggaaatatcttcccataaaaactagaaagaagcattctcggaaacatttatgtgaagcgtgcattcaactcacagagttgaacctttcttttgatagaacagttttgaaacactcttttgaacaattgcaggtgaatctttggagcgctttgaaggctttgttggaaatgggaatatcttcacacacaaactagccagaagcattctcagaaacttctttgtgatgtgtgcgttgaacccagagagatgaaactttcctttgatagagcagttttgaaacgtgtttttgtaagatctgcaagcggataattggcttcgctttgtgtcctttggtggaaacgggaatatcttctaataaaatctagacagaaatattctcagaatctcctttgtgatgtgggcattcaactaacacagttgaacatttcttttcacagagcagttttgagacactcttttggtagaatctgccagtggatctttggagcgctttgagggctgttgtgccaatggaaatatctgcccctaaaatctagacagaagcattctcagaaactgcttcgtgatgtttgcattcaactcacagacttgaacatacctcttcatagagcagttttgaaaacctctttttgtagaatctgcaagtggatattcggaccactttgaggccttcataggaaacagtaatatcttcacataaaaactagatagaagcattgtcagaaagttctttgtgatgtgtgaattcaactcacagagttgaaccttccttcaatagagcagttgtgaaacactctttttctagaatctgcaagtagatatttggagcgctttgaggccttcgttggaaaccggaatatcttcacaggaaaagtagatagaggcattctcagaaactttttcgtgatatgtggattcaactcacggcgttgaacctttcttttgatagagcagtgttgtaaaactcttttatcgaatctgcaagtagacatttggagtgctttgggggctgtggtgcaaaaggaaatgtcttcccatagaaactagactgaagcattctcagcaacttctttgtgacgtttgcattcatctcacagtgttgaacatacctttccatagagtagatttgaaacactatttttgtagaatctgcaagtggatatttggactgctttgaggcctccatcggaaacgggaatatattcacataaacactagacagaagcattctcagaaacttctttgtcatctgtccattcaactcacagaattgaaccttcctttttatggagcagttttgaaacactcttttggtagaatctgccagtggatatttggagcgcttggagggctattgtgccaatggaaatatctgcccctgaaaactagacagaagcattctgagaaaagttctttgtgatgtttgcattcaactagcagagttgaaccttccttttgatagggcagtttggaaacactctttttgtagaatcttcatgtggatatctggagcggtttgaggcctacggtcaaaaaggaaatatcttcctgggaaaaatagacgaaagcattctcagaaagtgctttgtgatatgcgcattcgactcaccgagttgaaacttttttttgatacagcagttttgaaacactctgtagaatctgaaagtggatatttggagctctttgagggctatggcggaaaagaaaatatattcacattaaagtagtcagcagcattctcagaaacttctttaggatgtttgcagtaaactcacagagttgaacatacctttccgtagagcagttttgaaacactctgtttgtgggatccgcaagtggatatttggaccgctttgagacctttgctggaaatgggaatatctgcacatttaaactagacagaagcattctcagaaacttcttggtgatgtgtgcattgtactcccaaatttgaatcttccttctcatggagcagttttcaaacactctgtttgtgcaatctacaattggagaattggaaggcttggatgcccgtggtagaaaaggaaatatcctcatataaaaactagacagaaggattcacagaaaatgctttgtgatgtgtgcattcaaatcacggagttgaatctttcttttgtcagagcagttttgaaacactgtttctgtggaatctgccagcggacacttggagcgctttgagggctatggttgagaaggaaatatcttcccataaaaactagaaagaagcattctcagaaacatttatgtgaagcgtgcattcaactcacagagttgaaccttccttttgatagaacagttttgaaacactcttttgaacaattgcaggtgaatctttggagcgctttgaagcctttgttggaaatgggaatatcttcacacacaaactagccagaagcattctcagaaacttctttgtgatgtgtgcgttgaacccagagagatgaacctttccttcgatagagcagttttgaaacgcgtttttgtaagatcggtaagcggataattggcttcgctttgtgtccttcggtggaaacgggaatatcttctaataaaaactagacagaaatattctcagaatctcctttgtgatgtgggcattcaactaacacagttgaacatttcttttcacagagcagttttgaaacactcttttggtagaatctgccagtggatatttggagcgcttggagggctgttgtgccaatggaaatacctgcccctgaaatctggacagaagcattctcagaaactacttcgtgatgtttgcattcaacacacagagttgaacatacctcttcacagagcagttttgaaaacctctttctgtagaatctgtaagtggatattgggaccactttgaggccttcataggaaacagtaatatcttcacataaaaactagatggaagcattctcagaaagttctttgtgatgtgtgaatccaactcacagagttgaaccttcctttaatacagcagtgttgaaacactccttttctagaatctgcaagtagatatttggagcgctttgaggccttcgttggaaaccggaatatcttcacaggaaaagtagatagaggcattctcagaaacttttttgtgatatgttgattcatctgacagcgttgaacctttcctttgatagagcagttttgaaaaactcttttgtcgaatctgcaagtagacatttggagtgctttgaggtctgtggtgccaaaggaaatgtcttcccatggaaactagactgaagcattctcagcaacttctttgtgacgtttgcattcatctcacagtgttgaacatacctttccatagagtagttttgagacactatttttgtagaatctgcaagcggatatttggactgctttgaggccttcatcggagacgggaatatcttcacataaacactaggcagaagcattctcagaaactactttgtgatctgtccattcaactcacagagttgaaccttcctttttatggagcagttttgaaacactgtttttggagaatctgcaagtggatatttggagcgctttgaggcctatggtagaaaaagaaatatctgcctctaaaaactagacagaagcattctgagaaacttctttgtgatgtttgcattcaactaccagagttgaatcttccttttgatagggcagtttggaaacactctttttgtagaatctgcatgtggatatctggagcgatttgaggcctatggtcaaaaaggaaatatcttcctgggaaaaatagacgaaagaattctcagaaactgctttgtgacatgtgcattcgactcaccgtgttgaaactgtttttcgatagagcagttttgaaacactctgtagaatctgaaagtggatatttggagctctttgagggctatggcggaaaagaaaatatattcacattaaagtagacagcagcattctcagaaacttctttaggatgtttgcagtaaactcacagagttgaacatacctttcggtagagcagttttgaaacactgtttgtgggatccgcaagtggatatttgcaccgctttgagacctttgctggaaatgggaatatcttcacatataaactagacggaagcattctcagaaacttcttcgtgatgtgtgcattctactcccgaatttgaatcttccttttcatgaagcagttttgaaacactctgtttgtgcaatccacaagtggataattggaacgctttgatgcgcatggtagaaaaggaaatatcctcatataaaaactagacagaaggattcacagaaaatgctttgtgatgtgtgcattcaaatcacggagttgaatctttcttttgttagagcagttttgaaacactgtttctgtggaatctgccagcggacacttggagcgctttgagggctatggtggagaagggaaatatcttcccataaaaactagagagaagcattctcggaaacatttatgtgaagcgtgcattcaactcacagagttgaacctttcttttgagagaacagttttgaaacactcttttgaacaattgcaggtgaatctttggagcgctttgaaggctttgttggaaatgggaatatcttcacacacaaactagccagaagcattctcagaaacttctttgtgatgtgtgcgttgaacccagagagatgaacctttcctttgatagagcagttttgaaacgtgtttttgtaagatctgcaagcggatagttggcttcgctttgtgtcctttggtggaaacgggaatattttctaataaaaactagacagaaatattctcagaatcttctttgtgatgtgggcattcaactaacacagttgaacctttcttttcacagagcagttttgaaagactcttttggtagaatctgccagtggatatttggagcgctttgagggctattgtgccaatggaaatatcttcccctaaaaactagacagaagcattctcagaaactgctttgtgatgtttgcattcaactcacagagttgaacataccttttcatagagcagttttgaaaacctctttttgtagaatctgcaagaggatattcggaccactttgaggccttcataggaaacagtaatatcttcgcataaaaactagatagaagcattgtcagaaagttctttgtgatgtgtgaaatcaactcacagagttgaaccttcctttaatagagcagttttgaaacactctttttctagaatctgcaagtagatatttggagcgctttgaggccttctttggaaaccggaatatcttcacataaaaagtagatagaggcatgctcagaaacttttctgtcatatgtagattcaactcacagcgttgaacctttcttttgatagagcagttttgaaaaactcttttatcgaatctgcaagtagacatttggagtgctttgagggctgtggtgcaaaaggaaatgtcttcccgtagaaactagactgaagcattctcagcaacttcttggtgacgtttgcattcatctcacagtgttgaacatacctctccatagagtggttttgaaacactgtttttgtagaatcggcaagtggatatttggactgctttgaggccttcatcggaaacgggaatatcttcacataaacactagagagaagcattctcagaaacttctttgtgatctgtccattcaactcacagagttgaaccttcctttttatggagcagttttgaatcactgtttttggagaatctgcaagtggatatttggagtgctttgaggcctatggtagaaaaagaaatatctgcctctaaaaaccagacagaagcattctgagaaacttctttgtgatgtttgcattcaactaccagagttgaatcttccttttgatagggcagtttggaaacactctttttgtagaatctgcatgtggatatctggagcgatttgaggcctacggtccaaaaggaaatatcttcctgggaaaaatagaggaaagcattctcagaaactgctttgtgatatgtgcattcgactcaccgagttgaaactttttttggatagagcagttttgaaacactctgtagaatctgaaggtggatatttggagctctttgagggctatggcggaaaagaaaagatattcacattaaactagacagcagcattctcagagacttcttgaggatgtttgcagtaaactcacagagttgaacatacctttccgtaaagcagttttgaaaccctctgtttgtgggatctgcaagtggatatttggaccgctttgagacctttgctggaaatgggaatatcttcacatataaactagacagaagcattctcagaaacttcttcgtgatgtgtgcattctcctcgcaaatttgaatcttccttttcatgaagcagttttgaaacactctgtttgtgcaatccacaattggataattggaacgctttgatgcccatggtagaaaaggaaatatcctcatataaaaactagacagaaggattcacagaaaatgctttgtgatgtgtgcattcagatcacggagttgaatctttcttttgttagagcagttttgaaacactgtttctgtgcaatctgccagcggacacttggagcgctttgagggctatggtggagaaggaaatatcttcacataaaaactagaaagaaaagcattctcagaaacatttatgtgaagcgtgcattcaactcacagagttgaaccttccttttgatacaacagttttgaaacactcttttgaacaattgcaggtgaatctttggagcgctttgaagcctttgttgcaaatgggaatatcttcacacacaaactagccagaaagcattctcagaaacttctttgtgatgtgtgcgttgaacccagagagatgaacctttcctttgatagagcagttttgaaacgtgtttttgtaagatcggcaagcggataattggcttcgctttgtgtcctttggtggaaacgggaatatcttctaataaaaactagacagaatattctcagaatctcctttgtgatgtgggcattcaactaacacagttgaacatttcttttcacagagcagttttgaaacactcttttggtagaatctgccagtggatacttggagagcttggagggctattgtgccaatggaaatatctgcccctgaaaactagacagaagcattctcagaaactacttcgtgatgtttgcattcaacacacagagttgaacatacctcttcacagagcagttttgaaaacctctttctgtagaatctgcaagtggatattcggaccactttgaggccttcacaggaaacagtaatatcttcacataaaaactagacagaagcattgtcagaaagttctttgtgatgtgtgaattcaactcacagtgttgaaccttcttttcatagagcagttttgaaacactctttttctagaatctgcaagtagatatttggagcgctttgaggccttcgttggaaaccggaatatcttcacataaaaagtagatagaggcattctcagaaacttttttgtgatatgtagattcaactcacagcgttgaacctttcttttgatagagcagttttggaaaactcttttatcgaatctgcaagtagacatttggagtgctttgagggctctggtgcaaaaggaaatgtcttcccatagaaactagactgaaagcattctcagcaacttcttggtgacgtttgcatgcatctcacagtgttgaacatacctttgcatagagcggttttgaaacactatttttgtagaatctgcaagtggatatttggactgctttgaggccttcatcggaaacgggaatatcttcacataaacactagacagaagcattctgagaaacttctttgtgatctgtccattcaactcacagagttgaaccttcctttttatggagcagttttgaatcactgtttttggagaatctgcaagtggatatttggagcgctttgaggcctatggtagaaaaagaaatatctgcctctaaaaaccagacagaagcattccgagaaacttctttgtgatgtttgcattcaactagcagagttgaaccttccatttgatagggcagtttggaaacactctttttgtagaatctgcatgtggatatctggagcggtttgaggcctacggtcaaaaaggaaatatcttcctgggaaaaatagacgaaagcatcctcagtaaactgctttgtgatatgtgcattcgactcactgagttgaaactttttttggatagagcagttttgaaacactctgtagaatctgaaagtggatatttggagctctttgagggctatggcggaaaagaaaatatattcacattaaactagacagcagcattctcagaaacttctttaggatgtttgcagtaaactcacagagttgaacatacctttccgtagagcagttttgaaacactctgtttgtgggatccgcaagtggatatttggaccgatttgagacctttgctgcaaatgggaatatcttcacatataaactagacagaagcattctcagaaacttcctcgtgatgtgtgcattctactcccgaatttgaatcttccttttcatgaagcagttttgaaacactctgtttgtgcaatccacaattggataattggaacgctttgatgcccatggtagaaaaggaaatatcctcatatgaaaactagacagaatgattcacagaaaatgctttgtgatgtgtgcattcaaatcacggagttgaatctttcttttgtcagagcagttttgaaacactgtttctgtggaatctgccagtggacacttggagcgctttgagggctgtggtggagaaggaaatatcttcccataaaaactagaaagaagcattctcagaaacatttatgtgaagcgtgcattcaactcacagagttgaaccttcctttgatacaacagttttgaaacactcttttgaacaattgcaggtgaatctttggagcgctttgaagcctttgttggaaatgggaatatcttcacacgcaaactagccagaagcattctcagaaacttctttgtgatgtgtgcgttgaacccagagagatgaacctttcctttgatagagcagttttgaaacgtgtttttgtaagatctgcaagcggatagttggcttcgctttgtgtcctttggtggaaacggcaatatcttctaataaaaactagagagaaatattctcagaatctactttgtgatgtgggcattcaacttacacagttgaacatttcttttcacagagcagttttgaaacactcttttggtagaatctgccagtggatatttggagcgcttggagggctattgtgccaatggaaatatctgcccctgaaaactagacagaagcattctcagaaactactttgtgatgtttgcattcaactcacagagttgaacatacctcttcatagagcagttttgaaaacccctttttgtagaatctgcaagtggatattcggaccactttgaggccttcataggaaacagtaacatcttcacataaaaactagatagaagcattgtcagaaagttctttgtgatgtgtgaattcaactcacagagttgaaccttcctttaatagagcagttttgaaacactctttttctacaatctgcaagtagatatttggagcgcttggaggccttcgttggaaaccggaatatcttcacaggaaatgtagatagaggcattctcagaaacttttttgtgatatgtagattcaacttacagcgttgaacctttctttggatggagcagttttgaaaaacccttttatcgaatctgcaggtagacatttggggtgctttgagggctgtggtgcaaaaggaaatgtcttcccatagaaactagactgaagcattctcagcaacttctttgtgacgtttgcattcatgtcacagtgttgaacatacctttccatagagtagttttgaagcactatttttgtagaatctgcaagtggatatttggactgctttgaggccttcatcggaaacgggaatatcttcacataaacactagacagaagcattctcagaaacttctttgtggtctgtccattcaactcacagagttgaaccttcctttatatggagcagttttgaaaccctgtttttggagaatctgcaagtggatatttggagcactttgaggcctatggtagaaaaagaaatatctgcctatcacagctagacagaagcattccgagaaacttctttgtgatgtttccattcaactagcagagttgaaccttccttttgatagggcagtttggagacactctttttgtagaatctgcatgtggatatctggagcggtttgaggcctacggtcaaaaaggaaatatcttcctgggaaaaatagacgaaagcattctcagaaagtgctttgtgatatgtgcattcgactcaccaagttgaaacttttttttgatagagaagttttgaaacactctgtagaatctgaaagtggatatttggagctccttgagggctatggcggaaaagaaaatatattcacattaaagtagacagcagcattctcagaaacttctttaggatgtttgcagtaaactctcagagttgaacctacctttccgtagagcagttttgaaacactctgtttgtgggatccgcaagtggatatttggaccgctttgagacctttgctggaaatgggaatatcttcacatataaactagacagaagcattctcagaaacttcttcgtgatgtgtgcattctactcccgaatttgaatcttccttttcatgaagcagttttgaaacactctgttagcgcaatccacaattggataattggaacgctttgatgcccatggtagaaaaggaaatatcctcatataaaaactagacagaaggattcacagaaaatgctttgtgatgtgtgcattcaaatcacggagttgaatctttcttttgttagagcagttttgaaacactgtttctgtggaatctgccagcgtacacttggagcgctttgagggctacggtggagaaggaaatatcttcacataaaaactagaaagacgcattctcagaaacatttatgtgaagcgtgcattcaactcacagagttgaaccttccttttgatagaacagttttgaaacactcttttgaacaattgcaggtgaatctttggagcgctttgaagcctttgttggaaatgggaatatcttcacacacaaactagccagaagcattctcagaaacttccttgtgatgtgtgcgttgaacccagagagatgaaccattcctttgatagagcagttttgaaacgtgtttttgtaagatctgcaagcggatagttggcttcgctttgtgtcctttggtggaaacgggaatatcttctaataaaaactagacagaaatattctcagaatctcctttgtgaagtgggcattcaactaacacagttgaacatttcttttcacagagcagttttgaaacactcttttggtagaatctgccagtggatatttggagcgcttggagggctattgtgccaatggaaatatctgcccctgaaaactagacagaagcattctcagaaactacttcgtgatgtctgcattcaacacacagagttgaacatacctcttcagagagcagttttgaaaacctctttctgtagaatctgcaagtggatattcgggccactttgaggccttcataggaaacagtaatatcttcacataaaaactaaatagaagcattgtcagaaagttctttgtgatgcgtgaattcaactcacagagttgaaccttcctttaatagagcagttttgaaacactctttttctagaatctgcaagtagatatttggagcgctttgaggccttcgttggaaaccggaatatcttcacaggaaaagtagatagaggcattctcagaaacttttttgtgatatgtagattcaactcacagcgttgaacctttctttggatggagcagttttgaaaaactcttttatcgaatctgcaggtagactttcggggtgctttgagagctgtggtgcaaaaggaaatgtcttcccatagaaactagactgaatcattctcagcaacttcttggtgacgtttgcattcatctcacagtgttgaacatacctttgcatagagtagtttggaaacactatttttgtagaatctgcaagtggacatttggactgctttgaggccttcatcggaaacgggaatatcttcacataaacactagacagaatcattctcagaaacttctttgtcatctgtccattcaactcacagagttgaaccttcctttttctggagcagttttgaaacactccttttggagaatctgcaagtggatatttggagcgctttgaggcctatggtagaaaaagaaatatctgcctctaaaaaccagacagaaacattccaagaaacttctctgtgatgtttgcattcaactagcagagttgaaccttccttttgatagggcagtttggaaatactctttttgtagaatctgcatttggatatctggagcggtttgaggcctacggtcaaaaaggaaatatcttcctgggaaaaatagacgaaagcattctcagaaactgctttgtgatatgtgcattcgaatcaccgagttgaaacttttttttcatagagcagttttgaaacactctgtagattctgaaagtggctatttggaggtctttgagggctatggcggaaaagaaaatatattcacattaaactagacagcagcattctcagaaacctctttaggatgtttgcagtaaactcacagagttgaacatacctttccgtagagcagttttgaaacactctgtttgtgggatccgcaaggggatatttggaccgctttgagacctttgctggaaatgggaatatcttcacatataaactagacagaagcattctcagaaacttctttcgtgatgtgtgcattctactcccaaatttgaatcttccttttcatgaagcagttttgaaacactcggtttgtgcaatccacaattggataattggaacgctttgatgcccatggtagaaaaggaaatatcctcatataaaaactagacagaaggattcacagaaaatgctttgtgatgtgtgcattcaaatcacggagttgaatctttcttttgtcagagcagttttgaaacactgtttctgtggaatctgccagcggacacttggagcgctttgaggactatggtggagaaggaaatatcttcccataaaaactagaaagaagcattctcagaaccatttatgtgaagcatgcattcaactcacagagttgaaccttccttttgatagaacagttttgaaacactcttttgaacaattgcaggtgaatatttggagggctttgaagcctttgttggaaacgggaatatcttcacacacgaactagccagaagctttctcagaaacttctttgtgatgtgtgcgttgaacccagagagatgaacctttcctttgatagagcagttttgaaacgtgtttttgtaagatctgcaagcggatagttggcttcgctttgtgtcctttggtggaaacgggaatatcttctaataaaaactagacagaaatattctcagaatcttctttgtgatgtgggcattcaactaacagagttgaacgtttcttttcacagagcagttttgaaactctcttttggtagaatctgccagtggatatttggagcgctttgagggctattgtgccaacggaaatatctgcccctaaaaactagacagaagcattctcagaaactacttcgtgatgtttgcattcaacacacagagttgaacataccccttcccagagcagttttgaaaacctctttctgtagaatctgcaagtggatattcggaccactttgaggccttcataggaaacagtaatatcttcacataaaaactaaaaagaagcattgtcagaaagttctttgtgatgtgtgaattcaactcacagagttgaaccttcctttaatagagcagttttgaaacactctttttctagaatctgcaagtagatatttggagcgctttgaggccttcgttggaaactggaatatcttcacaggaaaagtagatagaggcattctcagaaacttttttgtgatatgtagattcaactcacagcgttgaacctttctttggatggagcagttttgaaaaactcctttatcgaatctgcaggtagacatttggggtgctttgagggctgtggtgcaaaaggaaatgtcttcccatagaaactagactgaagcattctcagcaacttcttggtgacgtttgcattcatctcacagtgttgaacatacgtttccatagagtggttttgaaacactgtttttgtagaatcggcaagtggatatttggactgctttcaggccttcatcggaaacgggaatatcttcacataaacactagagagaagcattctcagaaacttctttgtcatctgtccattcaactcacagagttgaaccttcctttttatggagcagttttgaaacactccttttggagaatctgcaagtggatatttggagcgctttgaggcctatggtagaaaaagaaatatctgcctctaaaaaccagacaaaagcattctgagaaacttctttgtgatgtttgcattcaaataccagcagttgaaccttccttttgatagggcagtttggaaacattctttttgtagaatctgcatgtggatatctggagcgatttgaggcctacggtcaaaaaggaaatatcttcctgggaaaaatagacgaaagcattctcagaaagtgctttgtgatatgtgcattcggctcaccgatttgaaacctttttttgatagagcagttttaaaacacactgtagaatctgaaagtggatatttggagctctttgagggctatggcggaaaagaaaatatattcacattaaagtagacagccagcattctcagaaacttctttaggatgtttgcagtaaactcacagagttgaacatacctttccgtagagcagttttgaaacactctgtttgtgggatccgcaagtggatatttggaccgctttgagacctttgctggaaatgggaatatcttcacgtataaactagacagagcattctcagaaacttcttggtgatgtgtgcattgtactcccaaatttgaatcttccttctcatggaacagttttgaaacactctgtttgtgcaatatacaattggagaattggaacgcttggatgcccgtggtagaaaaggaaatatcctcatataaaaactagacagaaggattcacagaaaatgctttgtgatgtgtgcattcaaatcacggagttgaatctttcttttgtcagagcagttttgaaacactgtttctgtggaatctgccagcggacacttggagcgctttgagggctatggtggagaaggaaatatcttcccataaaaactagaaagaagcattctcggaaacatttatgtgaagcgtgcattcaactcacagagttgaaccttccttttgatagaacagttttgaaacactcttttgaacaattacaggtgaatctttggagcgctttgaagcctttgttggaaatgggaatatcttcacacacaaactagccagaagcattctcagaaacttcttcgtgatgtgtgcgttgaacccagagagatgaacctttccttcgatagagcagttttgaaacgtgcttttgtaagatctgcaagcgcataattggcttcactttgtgtcctttggttgaaacgggaatatcttctaataaaaactagacagaaatattctcagaatctcctttgtgatgtgggcattcaactaacacagttgaacatttcttttcacagagcagttttgaaacactcttttggtagaatctgccagtggatacttggagcgcttggagggctattgtgccaatggaaatatctgcccctgaaaactagacagaagcattctcagaaactgctttgtgatgtttgcattcaactcacagagttgaacataccttttcatagagcagttttgaaaatatctttttgtagaatctgcaagtggatattcggaccagtttgaggccttcataggaaacagtaatatcttcacataaaaactagatagaagcattgtcagaaagttctttgtgatgtgtgaattcaacccacagagttgaaccttcctttaatagagcagttttgaaacactctttttctagagtctgcaagtagatatttggagcgctttgaggccttctttggaaaccggaatatcttcacataaaaagtagatagaggcattctcagaaacttttttgtgatatgttgattcatctgacagcgttgaacccttcttttgatagagcagttttgaaaaactcttttgtcgaatctgcaagtagacatttggagtgctttgagggctgtggtgccaaaggaaatgtcttcccatggaaactagactgaagcattctcagcaacttctttgtgacgtttgcattcatctcacagtgttgaacatacctttccatagagtagttttgagacactatttttgtagaatctgcaagtggatatttggactgctttgaggccttcatcggagacgggaatatcttcacataaacactagacagaagcattctcagaaacttctttgtcatctgtccattcaactcacagagttgaaccttcctttttatggagccgttttgaaacactccttttggagaatctgcaagtggatatttggagcgctttgaggcctatggtagaaaaagaaatatccgcccctaaaaaccagacagaagcattctgagaaacttctttgtgatgtttgcattcaactaccagagttgaaccttccttttgatagggcagtttggaaacactctttttgtagaatctgcatgtggatatctggagcgatttgaggcctacagtcaaaaaggaaatatcttcctgggaaaaatagacgaaagcattctcagaaactgctttctgatatgtgcattcgactcaccgagttgaaacttttttttgatagagaagttttgaaacactctgtagaatctgaaagtggatatttggagctctttgagggctatggcggaaaagaaaatatattcacattaaactagacagcagaattcccagaaaattctttaggatgtttgcagtaaactcacagagttgaacatacctttccgtagagcagttttgaaacactctgtttgtgggatccgcaattggattttggaccgctttgagacctttgctggaaacgggaatatcttcacatataaactagacagaagcattctcagaaacttcttcatgatgtgtgcattctactcccgaatttgaatcttccttttcatgaagcagttttgaaacactctgtttgtgcaatccacaattggataattggaacgctttgatgcccatggtagaaaaggaaatatcctcatataaaaactagacagaaggattcacagaaaatgctttgtgatgtgtgcattcaaatcacgcagttgaatctttcttttgttagagcagttttgaaacactgtttctgtggaatctgccagcggacacttgtagcgctttgagggctatggtggagaaggaaatatcttcacataaaaactagaaagaagcattctcagaaccatttatgtgaagcgtgcgttcaactcacagagttgaaccttccttttgatagtacagttttgaaacactcttttgaacaattgcaggtgaatatttggagggctttgaagcctttgttggaaatgggaatatcttcacacacaaactagccagaagcattctcagaaacttctttgtgatgtgtgcgttgaacccagagagatgaacctttcctttgatagagcagttttgaaacgtgcttttgtaagatcggcaagcggataattggcttcgctttgtgtcctttggtggaaacgggaatatcttctaataaaaactagacagaaatattctcagaatcttctttgtgatgtgggcattcaactaacacagttgaacgtttcttttcacagagcagttttgaaacactcttttggtagaatctgccagtggatatttggagcgctttgagggctattgtgccaatggaaatatcttcccatagaaactagacagaagcattctcagaaactacttcgtgatgtttgccttcaactcacagagttgaacatacctcttcatagagcagttttgaaaacctctttctgtagaatctgcaagtggatattcggaccactttgaggccttcataggaaacagtaatatcttcacataaaaactagatagaagcattgtcagaaagttctttgtgatgtgtgaattcaactcacagagttgaaccttcctttaatagagcagttttgaaacactctttttctagaatctgcaagtagatatttggagcgctttgaggccttcgttggaatccggaatatcttcacataaaacgtagatagaggcattctcagaaacttttttgtgatatgtagattcaactcacagcgttgaacctttcttttgatacagcggttttcaaaaactcttatgtcgaatctgcaagtagacatttggagtgctttgagggctgtggtgcaaaaggaaatgtcttcccatagaaactagactgaatcattctcaacaacttccttgtgacgtttgcattcatctcacagtgttgaacataccttttcatagagcagttttgaaacactctttttgtagaatctgcaattggatatttggactgcgttgaggccttcactggaaacgggaatatctacacataaacactagacagaagcattctgagaaacttctttgtgatctgtccattcaactcacagagttgaaccttcctttttatggagccgttttgaaacactgtttttgtagaatctgcaagtggatatttggagcgctttgaagcctatggtagagaaagaaatatctgcatatcaaaactagacagaagcattccgagaaacttctctgtgatgtttgcattcaactagcagagttgaaccttccttttgatagggcagtttggaaacactctttttgtagaatctgcatgtggatatctggagcggtttgaggcctacggtcaaaaaggaaatatcttcctgggaaaaatagacgaaaagcattctcagaaactgctttgtgatatgtgcattcgactcaccgagttgaaacttttttttgatacagcagttttgaaacactctgtagaatctgaaagtggatatttggagctctttgagggctatggcggaaaagaaaatatattcacattaaagtagacagcagcattctcagaaacttctttaggatgtttgcagtaaactcacagagttgaacctacctttccgtagagcagttttgaaacactctgtttgtgggatccgcaagtggatatttggaccgctttgagacatttgctggaaatgggaatatcttcacatataaactagacagaagcattctcagaaacttcttcgtgatgtgtgcattgtactcccaaatttgaatcttccttctcatggagcagttttgaaacactctgtttgtgcaatctaccattggagaataggaacgcttggatgcccgtggtagaaaaggaaatatcctcatataaaaactagacagaaggattcacagaaaatgctttgtgatgtgtgcattcaaatcatggagttgaatctttcttttgttagagcagttttgaaacactgtttctgtggaatctgccagcggacacttggagcgctttgagggctatggtggagaaggaaatatcttcacataaaaactagaaagaagcattctcggaaacatttatgtgaagcgtgccttcaactcacagagttgaaccttccttttgatagaacagttttgaaacactcttttgaacaattgcaggtgaatctttggagcgctttgaagcctttgttggaaatgggaatatcttcacacacaaactagccagaagcattctcagaaacttctttgtgatgtgtgcgttgaacccagagagatgaacctttcctttgatagagcagttttgaaacgtgtttttgtaagatctgcaagcggataattggctttgctttgtgtcctttggtggaaacgggaatatcttctaataaaaactagacagaaatattctcagaatcttctttgtgatgtgggcattcaactaacacagttgaacgcttcttttcacagagcagttttgaaacactcttttggtagaatctgccagtggatatttggagcgctttgagggctattgtgccaatggaaatatctgcccttaaaactagacagaagcattctcagaaactacttcatgatgtttgcattcaacacacagagttgaacatacctcttcacagagcagttttgaaaacctctttctgtagaatctgcaagtggatattcggaccactttgaggccttcataggaaacagtaatatcttcacataaaaactagatagaagcattgtcagaaagttctttgtgatgtgtgaattcaactcacagagttgaaccttcctttaatagagcagttttgaaacactcttcttctagaatctgcaagtagatatttggagcgctttgaggccttcgttggaaaccggaatatcttcacagaaaaagtagatagaggcattctcagaaacttttttgtgatatgttgattcatctgacagcgttgtacctttcttttgatagagcagttttgaaaaactcttttgtcgaatctgcaagtagacatttggagtgctttgagggctgtggtgcaaaaggaaatgtcttcccatggaaactagactgaagcattctcagcaacttcttggtgacgtttgcatgcatctcacagtgttgaacatacctttccatagagtggttttgaaacactgtttttgtagaatcggcaagtggatatttggactgctttgaggccttcatcggaaacgggaatatcttcacataaacactagagagaagcattctcagaaacttctttgtcatctgtccattcaactcacagaggtgaaccttcctttttatggagcagttttgaaacactgtttttggagaatctgcaagtggatatttggagcgctttgaggcgtatggtagaaaaagaaatatctgcctctaaaaaccagacagaagcattccgagaaacttctttgtgatgtttgcattcaactagcagagttgaaccttccttttgatagggcagtttggaaacactctttttgtagaatctgcatgtggatatctggagcggtttgaggcctacggttaaaaaggaaatatcttcctgggaaaaatagacgaaagcattctcagaaacttctttgtgatatgtgcattcgactctccgagttgaaactttttttggatagagcagttttgaaacactctgtagaatctgaaagtggatatttggagctctttgagggctatggcggaaaagaaaagatattcacattaaactagacagcagcattctcagaaacttctttaggatgtttgcagtaaactcacagagttgaacctacctttccgtagagcagttttgaaacactctgtttgtgggatccgcaagtggatatttggaccgctttgagacctttgctggaaatgggaatatctgcacatataaactagacagaagcattctcagaaacttcttggtgatgtgtgcagtctcctcccgaatttgaatcttccttttcatgaagcagttttcaaacactctgtttgtgcaatccacaattggataattggaacactttgatgcccatggtagaaaaggaaatatcctcatataaaaactagacagaaggattcacagaaaatgctttgtgatgtgtgcattcaaatcacggagttgaatctttcttttgtcagagcagttttgaaacactgtttctgtggaatctgactgcggacacttggagcgctttgagggctatggtggagaaggaaatatcttcccataaaaactagaaagaagcattctcggaaacatttatgtgaagcgtgccttcaactcacagagttgaaccttccttttgatagaacagttttgaaacactcttttgaacaattgcaggggaatctttggagcgctttgaagcctttgttggaaatgggaatatcttcacacacaaactagccagaagcattctcagaaacttctttgtgatgtgtgcgttgaacccacagagatgaacctttcctttgatgcagcacttttgaaacgtgtttttgtaagatcggcaagcggataactggcttcgctttgtgtcctttggtggaaacgggaatatcttctaataaaaactagacagaaatattctcagaatctcctttgtgatgtgggcattcaactaacacagttgaacatttcttttcagagagcagttttgaaacactcttttggtagaatctgccagtggatatttggagcgctttgagggctgttgtgccaatggaaatatctgcccctaaaatctagacagaagcattctcagaaactgctttgtgatgtttgcattcaactcacagagttgaacatacctttacatagagcagttttgaaaacctctttttgtagaatctgcaagaggatattcggaccactttgaggccttcataggaaacagtaatatcttcacataaaaactagatagaagcattgtcagaaagttctttgtgatgtgtgaattcaactcacagagttgaaccttcctttaatagagcagttttgaaatactctttttctagaatctgcaactagatatgtggagcgctttgaggccttctttggaaaccggaatatcttcacataaaaagtagatagaggcattctcagaaacttttttgtgatatgtagattcaactcacagcgttgaacctttctttggatggagtagttttgaaaaactcttttatcgaatctgcaggtagacatttggggtgctttgagggctgtggtgcaaaaggaaatgtcttcccatagaaactagactgaaagcattctcagcaacttctttgtgacgtttgcattcatctcacagtgttgaacatacctttccatcgagtacttttgaaacactgtttttgtagaatctgcaagtggatatgtggactgctttgaggccttcatcggaaacgggaatatcttcacataaacactagagagaagcattctcagaaactactttgtgatctgtccattcaactcacagagttgaaccttcctttttatggagcagttttggatcactgtttttggagaatctgcaagtggatatttggagcgctttgaggcctatggtagaaaaagaaatatctgcctctaaaaaccagacagaagcattccgagaaacttctttgtgatgtttgcattcaactagcagagttgaaccttccttttgatagggcagttttgaaacactctttttgtagaatctgcatgtggatatctggagcggtttgaggcctacggtcaaaaaggaaatatcttcctgggaaaaatagacgaaagcattctcagaaactgctttgtgatatgtgcattcgactcaccgagttgaaacttttttttgatagagcagttttgaaacactctgtagaatctgaaagtggatagttggagctctttgagggctatggcggaaaagaaaatatattcacattaaagtagacagcagcattctcagaaacttctttaggatgtttgtagtaaactcacagagttgaacatacctttccgtagagcagttttgaaacactctgtttgtggtatccgcaagtggatatttggaccgctttgagacctttgctggaaatgggaatatcttcacatataaactagacagaagcattctcagaaacttcttcgtgatgtgtgcattctactcccgaatgtgaatcttccttttcatgaagcagttttgaaacactctgtttgtgcaatccacaattggataattggaacgctttgatgcccatggtagaaaaggaaatatcttcatataaaaactagacagaaggattcacagaaaatgctttgtgatgtgtgcattcaaatcatggagttgaatctttcttttgttagagcagttttgaaacactgtttctgtggaatctgccagtggacacttggagcgctttgagggctatggtggagaaggaaatatcttcccataaaaactagaaagaagcattctcagaaacatttatgtgaagcgtgcattcaactcacagagttgaaccttccttttgatacaacagttttgaaacactcttttgaacaattgcaggtgaatctttggagcgctttgaagcctttgttgcaaatgggaatatcttcacacacaaactagccagaagcattctcagaaacttctttgtgatgtgtgcgttgaacccagagagatgaacctttccttggatagagcagttttgaaacgtgtttttgtaagatctgcaagcggataattggcttcgctttgtgtcctttggtggaaacgggaatatcttctaataaaaactagacagaaatattctcagaatctcctttgtgatatgggcattcaactaacacagttgaacatttcttttcacagagcagttttgaaacactcttttggtagaatctgccagtggatatttggagcgcttggagggctattgtgccaatggaaatatctgcccctgaaaactagacagaagcattctcagaaactgctttgggatgtttgcattcaactcacagcagttgaacatacctctgcatagagcagttttgaaaacctctttttgtagaatctgcaagtggatattcggaccactttgaggccttcataggaaacagtaatatcatcacataaaaactagatagaaacattgtcagaaagttctttgtgatgtgtgaattcaactcacagagttgaaccttcctttaatagagcagttttgaaacactctttttctagaatctgccagtagatatttggagcgctttgaggccttcgttggaaaccggaatatctccacataaaaagtagatagaggcattctcagaaacttttttgtgatatgtagattcaacttacagcgttgaacctttctttggatggagcagttttgaaaaacccttttatcgaatctgcaggtagacaattggggtgctttgagggctgtggtgcaaaaggaaatgtcttcccatagaaactagactgaagcattgtcagcaacttcttggtgacgtttgcattcatctcacagcgttgaacatacctttccatagagtggttttgaaacactgtttttgtagaatcggcaagtggatatttggactgctttcaggccttcatcagaaacgggaatatcttcacataaacactagagagaagcattctcagaaacttctttgtgatctgtccattcaactcacagagttgtaccttcctttttctggagcagttttgaaacactccttttggagaatctgcaagtggatatttggagcgctttgaggcctatggtagaaaaagaaatatctgcctctaaaaaccagacagaagcattccgagaaacttctttgtgatgtttgcattcaactagcagagtggaaccttccttttgatagggcagtttggaaacactctttttgtagaatctgcatgtggatatctggagcggtttgaggcctacggtcaaaaaggaaatatcttcctgggaaaaatagacgaaagcattctcagaaagtgctttgtgatatgtgcattcgactcaccgagttgaaacttttttttgatagagcagttttgaaacactctgcagaatctgaaagtggatatttggagctctttgagggctatggcggaaaagaaaatatattcacattaaagtagacagcagcattctcagaaacttctttaggatgtttgcagtaaactcacagagttgaacatacctttccgtagagcagttttgaaacactctgtttgtgggatccgcaaggggatatttggaccgctttgagacctttgctggaaatgggaatatcttcacgtataaactagacagaagcattctcagaaacttcctcgtgatgtgtgcattcttctcccgaatttgaatcttccttttcatgaagcagttttgaaacactctgtttgtgcaatccacaattggataattggaacgctttgatgcccatggtagaaaacgaaatatcctcatataaaaattagacagaaggattcagagaaaatgctttgtgatgtgtgcattcaaatcacggaggtgaatctttgttttcttagagcagttttgaaacactgtttctgtggaatctgccagcggacacttggagcgctttgagggctatggtggagaaggaaatatcttcacataaaaactagaaagaagcattctcagaaacatttatgtgaagcgtgcattcaactcacagagttgaaccttccttttgatacaacagttttgaaacactcttttgaacaattgcaggtgaatctttggagcgctttgaagcctttgttggaaatgggaatatcttcacacacaaaccagccagaaacattctcagaaacttctttgtgatgtgtgcgttgaacccagagagatgaacctttcctttgatagagcagttttgaaacgtgtttttgtaagatcggcaagcggataattggcttcgctttgtgtcctttggtggaaacgcgaatatcttctaataaaaactagacagaaatattctcagaatcttctttgtgatgtgggcattcaacaaacacagttgaacatttcttttcacagagcagttttgaaacactcttttggtagaatctgccagtggatatttggagcgctttgagggctattgtgccaatggaaatatctgcccctaaaaactagacagaagcattctcagaatctacttcgtgatgtttgcattcaacacagagagttgaacatacctcttcacagagcagttttgaaaacctctttctgtagaatctgcaagtggatattcggaccactttgaggccttcataggaaacagtaatatcttcacataaaaactagatagaagcattgtcagaaagttctttgtgatgtgtgaattcaactcacagagttgaaccttcctttaatagagcagttttgaaacactctttttctagaatctgcaagtagatatttggagcgctttgaggccttcgttggaaaccggaacatcttcacataaaaagtagatagaggcattctcagaaaattttgtgatatgtagattcatctgacagcgttgaacctttcttttgatagagcagttttcaaaaactcttttgtcgaatctgcaagtagacatttggagtgctttgagggctgtggtgccaaaggaaatgtcttcccatagaaactagaatgaagcattctcagcaacttctttgtgacgtttgcattcatctcacagtgttgaacatacctttccatagagtagttttgaagcactatttttgtagaatctgccagtggatatttggactgctttgaggccttcatcggaaacgggaatatcttcacataaacactagacagaagcattctcagaaacttcttggtgatctgtccattcaactcacagagttgaaccttcctttttatggagcagttttgaaacattgtttttggaggatctgcaagtggatatttagagcgctttgaggcctatggtagaaaacgaaatatctgcctataacaactagacagaagcattctgagaaacttctttgtgatgtttgcattcaactaccagagttgaaccttccttttgatagggcagtttggaaacactctttttgtagaatctgcatgtggatatctggagcgatttgaggcctacggtccaaaaggaaatatcttcctgggaaaaatagacgaaagcattctcagaaagtgctttgtgatatgtgcattcgactcaccgagttgaaacttttttttgatagagcagttttgaaacactctgtagaatctgaaagtggatatttggagctctttgagggctatggcggcaaagaaactatattcacattaaagtagacagcagcattcccagaaacttctttaggatgtttgcagtaaactcacaggagttgaacacacctttccgtagagcagctttgaaacactctgtgtgtgggatccgcaagtggatatttggaccgctttgagacctttgctggaaacgggaatatcttcacatataaactggacagaagcattctcagaaacttcttcgtgatgtgtgcattctactcccaaatttgaattttccttttcatgaagcagttttggaacactctatttgtgcaatctacaattggataattggaacgctttgatgcccatggtagaaaaggaaatatcctcatataaaaactagacagaaggattcacagaaaatgctttgtgatgtgtgcattcaaatcatgcagttgaatctttcttttgttagagcagttttgaaacactgtttctgtggaatctgccagcggacacttggagcgctttgagggctatggtggagaaggaaatatcttcacataaaaactagaaagaagcattctgagaaccatttatgtgaagcgtgcgttccactcacagagttgaaccttccttttgatagaacagttttgaaacactcttttgaacaattgcaggtgaatatttggagggcttttaagcctttgttggaaatgggaatatcttcacacacaaactagccagaagcattctcagaaacttctttgtgatgtgtgcgttaaacccagagagatgaacctttcctttgatagagcagttttgaaacgtgtttttgtaatatcggcaagcggataattggcttcgctttgtgtcctttggtggaaacgggaatatcttctaataaaaactagacagaaatattctcagaatcttctttgtgatgtgggcattcaacaaacacagttgaacatttcttttcacagagcagttttgaaacactcttttggtagaatctgccagtggatatttggagcgctttgaaggctattgtgccaatggaaatatcttcccctaaaaactagacagaagcattctcagaaactacttcatgatgtttgcattcaacacacacagttgaacatacctcttcacagagcagttttgaaaacctctttctgtagaatctgtaagtggatattgggaccactttgaggccttcataggaaacagtaatatcttcacataaaaactagatggaagcattctcagaaagttctttgtgatgtgtgaattcaactcacagagttgaaccttccttcaatagagcagttttgaaacactctttttctagaatctgcaagtagatatttggagcgcgttgaggccttcgttggaaaccggaatatcttcacaggaaaagtagatagaggcattctcagaaacttttttgtgatatgtagattcaactcacagcgttgaacctttctttggatggagcagttttgaaaaacccttttatcgaatctgcaggtagacattcggggtgctttgagggctgtggtgcaaaaggaaatgtcttcccatagaaactagactgaagcattctcagcaacttcttggtgacgtttgcattcatctcacagtgttgaacatacctttccatagagtgattttgaaacactgtttttgtagaatcggcaagtggatatttggactgctttgaggccttcatcggaaacgggaatatcttcacataaacactacagagaagcaatctcagaaacttctttgtggtctgtccattcaaatcacagagttgaaccttcctttttatggagcagttttggaaccctgtttttggagaatctgcaagtggatatttggagcgctttgaggcctatggtagaaaaagaaatatctgcctatgacaactagacagaagcattctgagaaacttctttgtgatgtttgcattcaactaccagaggtgaaccttccttttgatagggcagtttggaaacactctttttgcagaatctgcatgtggatatctggagcgatttgaggcctacggtccaaaaggaaatatcttcctgggaaaaatagacgaaagcattctcagaaactgctttgtgatatgtgcattcgactcaccgagttgaaactttttttggatagagcagttttgaaacactctgtagaatctgaaagtggatatttggagctactttgagggctatggcggaaaagaaaatatattcacattaaactagacagcagcattcccagaaacttctttaggatgtttgcagtaaactcacagagttgaacatacctttccgtagagcagctttgaaacactctgtgtgtgggatccgcaagtggatatttggaccgctttgagacctttgctggaaatgggaatatcttcacatataaactggacagaagcattctcagaaacttcttcgtgatgtgtgcattctcctcccgaatttgaatcttccttttcatgaagcagttttgaaacactctgtttgtgcagtccacaattggataattggaacgctttgatgtccaaggtagaaaaggaaatatcctcatataaaaactagacagaaggattcacagaaaatgctttgtgatgtgtgcattcaaatcacggagttgaatctttcttttgttagagcagttttgaaacactgtttctgtggaatatgccagcggacacttggagcgctttgagggctacggtggagaaggaaatatcttcacataaaaactagaaagaagcattctcagaaccatttatgtgaagcgtgcattcaactcacagagttgaaccttccttttgatagaacagttttgaaacactcttttgaacaattgcaggtgaatatttggagggctttgaagcctttgttggaaacgggaatatcttcacacacgaactagccagaagcattctcagaaacttctttgtgatgtgtgcgttgaacccagagagatgaacctttcctttgatagagcagttttgaagcgtgtttttgtaagatcggcaagcggataattggcttcgctttgtgtcccttggtggaaacgggaatatcttctaataaaaactagacagagatattctcagaaacttctttgtgatgtgggcattcaactgacacagtcgaacatttcttttcacagagcagttttgaaacactcttttggtcgaatctgccagtggatatttggagcgctttgagggctattgtgccaatggaaatatctgcccctaaaaactagacagaagcattctcagaaactgcttcgggatgtttgcattcaactcacagagttgaatatacctctgcatagagcagttttgaaaacctctttttgtagaatctgcatgtggatattcggaccactttgaggccttcatgggaaacagtaatatcttcacataaaaactagatagaagcattgtcagaaagttctttgtgatgtgtgaattcaactcacagagttgaaccttcctttaatagagcagttttgaaacactctttttctagaatctgcaagtagatatttggagcgctttgaggccttcgttggaaaccggaatatcttcacaggaaaagaagatagaggcattctcagaaacttttttgtgatatgtagattcaactcacagcgttgaacctttctttggatggagcagttttgaaaaactcttttatcgaatctgcaggtagacatttggggtgctttgagggctgtggtgcaaaagaaaatgtcttcccatagaaactagactgaagcattctcagcaacttctttgtgacgtttgcattcatctcacagtgttgaacatacctttccatagagtagttttcagacactatttttgtagaatctgcaagcggatatttggactgctttgaggccttcatcggagacgggaatatcttcacataaacactaggcagaagcattctcagaaacttctttgtgatctgtccattcaactcacagagttgaaccttcctttttatggagcagttttgaatcactgtttttggggaatctgcaagtggatatttcgagcgctttgaggcctatggtagaaaaagaaatatctgcctctaaaaaccagacagaagcattccgagaaacttctctgtgatgtttgcattcaactagcagagttgaaccttcctcttgatagggcagtttggaaacactctttttgtagaatctgcatgtggatatctggagcggtttgaggcctacggtcaaaaaggaaatatcttcctgggaaaaatagacgaaagcattctcagaaactgctttgtgacatgtgcattcgactcaccgtgttgaaactgtttttcgatagagcagttttgaaacactctgtagaatctgaaagtggatatttggagctctttgagggctatggcggaaaagaaaatatattcacattaaagtagacagcagcattctcagaaacttctttaggatgtttgcagtaaactcacagagttgaacatacctttccgttaagcagttttgaaacactctgtttgtgggatccgcaagtggatatttggaccgctttgagacctttgctggaaatgggaatatcttcacatataaactagacagaagcattctcagaaacttcttcgtgatgtgtgcattctactcccgaatttgaatcttccttttcatgaagcagttttgaaacactctgtttgtgcaatccacaattggataattggaacgctttgatacccatggtagaaaaggaaatagcctcatataaaaactagacagaaggattcacagaaaatgctttgtgatgtgtgcattcaaatcacgcagttgaatctttcttttgttagagcagttttgaaacactgtttctgtggaatctgccagcggacacttggagcgctttgagggctatggtggagaaggaaacatcttcccataaaaactagaaagaagcattctcggaaacatttatgtgaagcgtgcattcaactcacagagttgaaccttccttttgatggaacagttttgaaacactcttttgaacaattgcaggtgaatctttggagcgctttgaagcctttgttggaaatgggaatatcttcacacacaaactaggcagaagcattctcagaaacttctttgtgatgtgtgcgttgaacccagagagatgaacctttcctttgatagagcagttttgaaacgtgtttttgtaaggtcggcaagcggataattggcttcgcttagtgtcctttggtggaaacgggaatatcttctaataaaaactagacagaaatattctcagaatcttctttgtgatgtgggcattcaactaacagagttgaacgtttcttttcacagagcagttttgaaacactcttttggtagaatctgccagtggatatttggagcgctttgagggctattgtgccaacggaaatatctgcccctaaaaactagacagaagcattctcagaaactacttcgtgatgtttgcattcaacacacagagttgaacatacctcttcacagagcggttttgaaaaactctttctgtagaatctgcaagtggatattcggaccactttgaggccttcataggaaacagtaatatcttcacataaaaactagatagaagcattgtcagaaaattccttgtgatgtgtgaattcaactcacagagttgaaccttcctttaatagagcagttttgaaacactcttcttctagaatctgcaagtagatatttggagcgctttgaggccgtcgttggaaaccggaatatcttcacagaaaaagtagatagaggcattctcagaaactcttttgtgatatgttgattcatctgacagcgttgaacctttcttttgatagagcagttttgaaaaactcttttgtcgaatctgcaagtagacatttggagtgctttgagggctgtggtgccaaaggaaatgtcttcccatggaaactagactgaagcattctcagcaacttctttgtgacgtttgcattcatctcacagtgttgaacatacctttccatagagtagttttgagacactatttttgtagaatctgcaagcggatatttggactgctttgaggccttcatcggagacgggaatatcttcacataaacactagacagaagcattctcagaaacctctttgtggtctgtccattcaactcacagagttgaaccttcctttttatggagcagttttgaaaccctgtttttggagaatctgcaagtggatatttggagcgctttgaggcctatggtagaaaaagaaatatctacctatgacaactagacagaagcattctcagaaactgctttgtgatatgtgcattcgactcaccgagttgaaacttttttttgattgagcagttttgaaacactctgtagaatctgaaagtggatatttggagctctttgagggctatggcggaaaacaaaatatattcacattaaagtagacagcagcattctcagaaacttctttaggatgtttgcagtaaactcacagagttaaacatatctttccgtagagcagttttgaaacactctgtttgtgggatccgcaagtggatatttgggcccctttgagacctttgctagaaatgggaatatcttcacatataaactagacagaagcattctcagaaacttcttcgtgatgtgtgcattgtactcccaaatttgaatcttccttctcatggagcagttttgaaacactctgtttgtgcaatctaccattggagaattggaacgcttggatgcccgtggtagaaaaggaaatatcctcatataaaaactagacagaaggattcacagaaaatgctttgtgatgtgtgcattcaaatcacggagttgaatctttcttttgtcagagcagttttgaaacactgtttctgtggaatctgccagcggatacttggagcgctttgagggctgtggtggagaaggaaatatcttcccataaaaactagaaagaagcattctcagaaacatttatgtgaagcgtgcattcaacttacagagttgaaccttccttttgatacaacagttttgaaacactcttttgaacaattgcaggtgaatctttggagcgctttgaagcctttgttggaaatgggaatatcttcacacacaaactagccagaagcattctcagaaacttctttgtgatgtgtgcgttgaacccagagagatgaacctttccttcgatagagcagttttgaaacgtgtttttgtaagatctgcaagcggataattggcttcgctttgtgtcctttggtggaaacgggaatatcttctaataaaaactagacagaaatattctcagaatcttctttgtgatgtgggcaatcaactaacacagttgaacgtttcttttcacagagcagttttgaaacactcttttggtagaatctgccagtggatatttggagcgctttgagggctattgtgccaacggaaatatctgcccctaaaaactagacagaagcattctcagaaactacttcgtgatgtttgcattcaacacacagagttgaacatacctcttcacagagcagttttgaaaaactctttctgtagaatctgcaagtggatattcggaccactttgaggccttcataggaaacagtaatatcttcacataaaaactagatagaagcattgtcagaaagttctttgtgatgtgtgaattcaactcacagagttgaaccttcctttaatagagcagttttgaaacactctttttctagaatctgcaagtagatatttggagcgctttgaggccttcgttggaaactggaatatcttcacataaaaagtagatagaggcattctcagaaacttttttgtgatatgttgattcatctgacagcgttgaacctttcttttgatagagcagttttgaaaaactcttttgtcgaatctgcaagtagacatgtggagtgctttgagggctgtggtgccaaaggaaatgtcttcccatggaaactagactgaagcattctcagcaacttcttggtgacgtttgcattcatctcacagtgttgaacatacctatccatagagtggttttgaaacactgtttttgtagaatcggcaagtggatatttggactgctttgaggccttcatcggaaacgggaatatcttcacataaacactagagagaagcattctcagaaacttctttgtcatctgtccattcaactcacagaggtgaaccttcctttttatggagcagttttgaaacactgtttttggagaatctgcaagtggatatttggagcgctttgaggcctatggtagaaaaagaaatatctgcctctaaaaaccagacagaagcattctgagaaacttctttgtgatgtttgcattcaactaccagagttgaatcttccttttgatagggcagtttggaaacactctgtttgtagaatctgcatgtggatatctggagcgatttgaggcctatggtcaaaaaggaaatatcttcctgggaaaaatagacgaaagcattctcagaaactgctttgtgatatgtgcattcgactcaccgagctgaaacttttttttgatagagcagttttgaaacactctgtagaatctgaaagtggatatttggagctctttgagggctatggcggaaaagaaaatatattcacattaaactagacagcagcattctcagaaacttctttaggatatttgcagtaaactcacagagttgaacatacctttccgaagagcagttttgaaacactctgtttgtgggatccgcaagtggatatttggaccgctttgagacctttgctggaaatgggaatatcctcacatataaactagacagaagcattctcagaaacttcttcgtgatgtgtgcattctactcccaaatttgaatcttccttttcatgaagcagttttgaaacactctatttgtgcattctacaattggatgattggaacgctttgatgcccatggtggaaaaggaaatatcctcatataaaaactagacagaaggattcacagaaaatgctttgtgatgtgtgcattcaaatcacggagttgaatctttcttttgttagagcagttttgaaacactgtttctgtggaatctgccagcggacacttggagcgctttgagggctacggtggagaaggaaatatcttcacataaaaactaaaaagaagcattctcagaaacatttatgtgaagcgtgcattcaactcacagagttgaaccttcctttggatacaacagttttgaaacactcttttgaacaattgcaggtgaatctttggagcgctttgaagcccttgttggaattgggaatatcttcacacacaaactagccagaagcattctcagaaacttctttgtgatgtgtgcgttgaacccagagagatgaacctttccttggatagagcagttttgaaacgtgtttttgtaaggtctgcaagcggataattggcttcgctttgtgtcctttggtggaaacgggaatatcttctaataaaaactagacagaaatattctcagaatctcctttgtgatgtgggcattcaactaacacagttgaacatttcttttcacagagcagttttgaaacactcttttggtagaatctgccagtggatatttggagagcttggagggctgttgtgccaatggaaatatctgcccctaaaatctagacagaaagcattctcagaaactactttgtgatgtttgcattcaactcacagagttgaacatacctcttcatagagcagttttgaaaacctctttttgtagaatctgcaagtggatattcggaccactttgaggccttcataggaaacagtaataccttcacataaaaactagatagaagcattgtcagaaagttctttgtgatgtgtgaattcaactcacagagttggaccttcctttaatagagcagttttgaaacactctttttctagaatctgcaagtggatatttggagcgctttgaggccttcgttggaaaccggaatatcttcacaggaaaagtagatagaggcattctcagaaacttttctgtgatatgtagattcaactcacagcgttgaacctttctttggatggagcagttttgaaaaacccttttatcgaatctgcaggtagacatttggggtgctttgagggctgtggtgcaaaaggtaatgtcttcccatagaaactagactgaagcattctcagcaacttcttggtgacgtttgcattcatctcacagtgttgaacatacctctccatagagtggttttgaaacactctttttgtagaatcggcaagtggatatttggactgctttgaggccttcatcggaaacgggaatatcttcacataaacactagagagaagcattctcagaaacttctttgtggtctgtccattcaactcacagagttgaaccttcctttttatggagcagttttgaaaccctgtttttggagaatctgcaagtggatatttggagcgctttgaggcctatggtagaaaaagaaatatctgcctatgacaactagacagaagcattctgagaaacttctttgtgatgtttgcattcaactaccagagttgaaccttccttttgatagggcagtttggaaacactctctttgtagaatctgcatgtggatatctggagcgatttgaggcctacggtccgaaaggaaatatcttcctgggaaaaatagacgaaagcattctcagaaactgctttgtgatatgtgcattcgactcaccgagttgaaacttttcttggatagagcagttttgaaacactctgtagaatctgaaagtggatatttggagctctttgagggctatggcggaaaagaaaatatattcacattaaactagacagcagcattctcagaaacttctttaggatgtttgcagtaaactcacagatttgaacatacctttccgtagagcagttttgaaacactctatttgtgggatccgcaagtggatatttggaccgctttgagacctttgctggaaatgggaatatcttcacgtataaactagacagaagcattctcagaaacttcttcatgatgtgtgcattctactcccaaatttgaatcttccttttcatgaagcagttttgaaacactcggtttgtgcaatccacaattggataattggaacgctttgatgcccatggtagaaaaggaaatatcctcatataaaaactagacagaaggattcacagaaaatgctttgtgatgtgtgcattcaaatcacggagttgaatctttcttttgtgagagcagttttgaaacactgtttctgtggaatctgccagcggacacttggagcgctttgagggctatggtggagaaggaaatatcttcccataaaaactagaaagaagcattctcagaaacatctatgtgaagtgtgcattcaactcacagatttgaaccttcctttttcatagaacagttttgaaacactcttttgtacaattttaggtgaatatttggagctctttgaagcctttgttggaattgggaatatcttcacatacaaactagccagaagcattctcagaaacttctttgtgatgtgtgcgttgaactcagagagatgaacctttcctttgatagagcagttttgaaacgtgtttctgtaagatctgtatgtggatatttggggcgctttgagtcctttggtggaaacgggaatatcttctaataaaaactagacagagatattctcagaaacttctttgtgatgtgggcattcaactgacacagtcgaacgtttcttttcacagagcagttttgaaacactcttttggtcgaatctgccagtggatatttggagcgctttgagggctattgtgccaatggaaatatctgcccctaaaaactagacagaagcattctcagaaacttctttgtgatgtttgcattcaaataccagagttgaacctccctcttcatagagcagttttgaaatcctctttttgtagaatctgcaagtggatatttggaccactttgaggccttcataggaaacagtactatcttcacataaaaactagatagaagcattgtcagaaagttctttgtgatgtgtgaattcaactcacagagttgaaccttcctttaatagagcagttttgaaacgctctttttctagaatctgccagtagatatttggagcgctttgaggccttcgttggaaacaggaatatcttcacataaaaagtagatagaggcattctcagaaacttttttgtgatatgtagattccactcacagcgttgaacctttcttttgatagagcagttttgaaaaattcttttatcgaatctgcaagtagacatttggggtgctttgagggctgtggtgcaaaaggaaatgtcttcccatggaaactagactgaagcattctcagcaacttctttgtgacgtttgcattcatctcacagtgttgaacatacctttccatagagtagttttgaagcactatttttgtagaatctgcaagtggatatttggactgctttgaggccttcatcggagacgggaatatcttcacataaacactagacagaagcattctcagaaacttctttgtgatctgtccattcaactcacagagttgaaccttcctttttatggagcagttttgaaacactgtttttggagaatcttcaagtagatatttggagcgctttgtggcctatgttagaaaaagaaatatctgcctataacaactagacagaagcattctgagaaacttctttgtgatgtttgcattcaactaccttagttgaaccttccttttgatagggcagtttggaaacactctttttgtagaatctgcatgtggatatctggagcgatttgaggcctatggtcaaaaaggaaatatcttcctgggaaaaatagacgaaagcattctcagaaactgctttgtgatatgtgcattcgactcaccgatttgaaacttttttttgatagagcagttttgaaacactctgtagaaactgaaagtggatattaggagctctttgagggttatggcggaaaagaaaatatattcacattaaactagacagcagcattcccagaaacttctttaggatgtttgcagtaaactcacagagttgaacatacctttccgtagagcagttttgaaacactctgtttgtgggatccgcaagtggatatttggaccgctttgagacctttgctggaaacgggaatatgttcacatataaactagacagaagcattctcagaaacttcttcgtgatgtatgcattctactccctaatttgaatcttccttttcatgaagcagttttgaaacactctatttgtgcattctacaattggatgattggaacgctttgatgcccatggtagaaaaggaaatatcctcatataaaaactagacagaaggattcacagaaaatgctttgtgatgtgtgcattcaaaccacggagttgaatctttcttttgttagagcagttttgaaacactgtttctgtggaatctgccagcggacacttggagcgctttgagggctatggtggagaaggaaacatcttcccataaaaactagaaagaagcattctgagaaccatttatgtgaagcgtgcattcaactcacagagttgaaccttccttttgatagaacagttttgaaacactcttttgaacaattgcaggtgaatatttggagggctttgaagcctttgttggaaatgggaatatcttcacacacaaactagccagaagcattctcagaaacttctttgtgatgtgtgcgttgaatccagagagatgaacctttcctttgatagagcagttttgaaacgtgtttttgtaagatctgcaaacggataattgacttcgccttgtgtcctttggtggaaacgggaatatcttctaataaaaactagacagaaatattctcagaatctcctttgtgatgtgggcattcaactaacgcagttgaacatttcttttcacagagcagttttgaaacactcttttggtagaatctgccagtggatatttggagcgctttgagggctgttgtgccaatggaaatatctgcccctaaaatctagacagaagcattctcagaaactacttcgtgatgtttgcattcaactcacagagttgaacatacctcttcacagagcagttttgaaaacctccttttgtagaatctgcaagtggatattcggagcactttgaggccttcataggaaacagtaatatcttcgcataaaaactagatagaagcattgtcagaaagttctttgtgatgtgtgaattcaactcacagagttgaaccttcctttaatagagcagttttgaaacactctttttttagaatctgcaagtagatatttcgagcgctttgaggccttcgttggaaaccggaatatcttcacaggaaaagtagatagaggcattctcagaaacttttttgtgatatgttgattcatctgacagcgttgaacctttcttttgatagagcagttttgaaaaactcttttgtcgaatctgcaagtagacatttggagtgctttgagggctgtggtgccaaaggaaatgtcttcccatggaaactagactgaagcattctcagcaacttcttggtgacgtttgcattcatctcacagtgttgaacatacctttccatagagtggttttgaaacactgtttttgtagaatcggcaagtggatatttggactgctttgaggccttcgtcggaaacgggaatatcttcacataaacactagagagaagcattctcagaaacttctttgtcatctgtccattcaactcacagaagttgaaccttcctttttatggagcagttttgaaacactccttttggagaatctgcaagtggatatttggagcgctttgaggcctatggtagaaaaagaaatatctgcctctaaaaaccagacagaaagcattctgagaaacttctttgtgatgtttgccttcaactaccagagttgaaccttccttttgatagggcagtttggaaacactctttttgtagaatctgcatgtggatatctggagcgatttgaggcctacggtccaaaaggaaatatcttcctgggaaagatagacgaagcattctcagaaactgctttgtgatatgtgcattcgactctccgagttgaaacttttttcggatagagcagttttgaaacactctgtagaatctgaaagtggatatttggagctctttgagggctatggcggaaaagaaaagatattcacattaaactagacagcagcattcccagaaacttctttaggatgtttgcagtaaactcacagagttgaacacacctttccgtagagcagttttgaaacactctgtttgtgggatccgcaagtggatatttggaccgctttgagacctttgctggaaacgggaatatcttcacatataaactggacagaagcattctcagaaacttcttcgtgatgtgtgcattctactcccaaatttgaatcttccttttcatgaagcagttttgaaacaatctgtttgtgcaatccacaattggataattggaacgctttgatgcccatggtagaaaaggaaatatcctcatataaaaactagacagaaggatccacagaaaatgctttgtgatgtgtgcattcaaatcacggagttgaatctttcttttgtcagagcagttttgaaacactgtttctgtggaatctgccagcggacacttggagcgctttgagggctatggtggagaaggaaatatcttcccataaaaactagagagaagcattctcagaaccatttatgtgaagcgtgcgttcaactcacggagttgaaccttccttttgatagaacagttttgaaacactcttttgaacaattgcaggtgaatatttggagggctttgaagcctttgttggaaatgggaatatcttcacacacaaactagccagaagcattctcagaaacttctttgtgatgtgtgcgttgaacccagagagatgaacctttcctttgatagagcagttttgaaacgtgtttttgtaagatctgcaagcggatagttggcttcgctgtgtgtcctttggtggaaacgggaatatcttctaataaaaactagacagaaatattctcagaatcttcttcgtgatgtgggcattcaactaacacagttgaaccttacttttcacagagcagttttgaaacacccttttggtagaatctgccagtggatatttggagcgctttgagggctattgtgccaacggaaatatctgcccctaaaaactagacagaagcatgctcagaaactgctttgtgatgtttgcattcaactcacagagttgaacataccttttcatagagcagttttgaaaacctctttttgtagaatctgcaagaggatattcggaccactatgaggccttcataggaaacagtaatatcttcacgtaaaaactagatagaaacattgtcagaaagttctttgtgatgtgtgaattcaactcacagagttgaaccttcctttaatagagcagttttgaaacactctttttctagaatccgccagtagatatttggagcgctttgaggccttcgttggaaaccggaatatctccacataaaaagtagatagaggcattctcagaaacttttttgtgatatgtagattcaactcacagcgttgaacctttctttggatggagcagttttgaaaaactcttttatcgaatctgcaggtagacatttgtggtgctttgagggctgtggtgcaaaaggaaatgtcttcccatagaaactagactgaagcattctcagcaacttcttggtgacgtttgcattcatctcacagtgtttaacatacctttccatagagtagttttgaaacactgtttttgtagaatcggcaagtggatatttggactgctttgaggccttcatcggaaacgggaatatcttcacataaacactagagagaagcattctcagaaacttctttgtgatctgtccattcaactcacagagttgaaccttcctttttatggagcagttttgaaacactgtttttggagaatctgcaagtagatatttggagcgctttgtggcctatggtagaaaaagaaatatctgcctataacaactagacagaagcattctgagaaacttctttgtgatgtttgcattcaactaccagaggtgaaccttccttttgatagggcagtttggaaacactcatttggagaatctgcatgtggatatctggagcgatttgaggcctactgtccaaaaggaaatatcttcctgggaaaaatagacgaaagcattctcagaaactgctttgtgatatgtgcattcgactcaccgagttgaaacttttatttgatagagcagttttgaaacactctgtagaatctgaaagtggatatttggagctctttgagggctatggcggaaaagaaaatatattcacattaaactagacagcagcattctcagaaacttctttaggatgtctgcagtaaactcacagagttgaacatacctttccgtagagcagttttgaaacactctgtttgtgggatccgcaagtggatatttggacctctttgagatctttgctggaaatgggaatatcttcacatataaactagacagaagcattctcaaaaacttcttcgtgatgtgtgcattgttctcccaaatttgaatcttccttctcatggagcagttttgaaacactctgtttgtgcaatctacaattggagaattggaacgcttggatgcccgtggtagaaaaggaaatatcctcatataaaaactagacagaaggattcacagaaaatgctttgtgatgtgtgcattcaaatcacggagttgaatctttcttttgtcagagcagttttgaaacactgtttctgtggaatctgccagcggacacttggagcgctttgagggctatggtggagaaggaaatatcttcccataaaaactagagagaagcattctcagaaacatgtatgtgaagcgtgaattcaactcacagtgttgaaccttccttttgatagaacagtttttaaacactcttttgaacaattgcaggtgaatctttggagcgctttgaagcctttgttggaaatgggaatatcttcacacacaaactagccagaagcattctcagaaacttctttgtgatgcgtacgttgaacacagagagatgaacctttcctttgatagagcagttttgaaacgtgtttttgtaagatctgcaagcggataatcggcttcgctttgtgtcctttggtggaaacgggaatatcttctaataaaaactagacagaaatattctcagaatctcctttgtgatgtgggcattcaactaacacagttgaactttcttttcacagagcagtttagaaacactcttttggtagaatctgccagtggatatttggagcgctttgagggctattgtgccaatggaaatatctgcccctgaaatctagacagaagcattctcagaaactacttcgtgatgtttgcattcaactcacagagttgaacatacctcttcatagagcagttttgaaaacctctttttgtagaatctgcaagaggatattcggaccactttgaggccttcataggaaacagtaatatcttcgcataaaaactagatagaagcattgtcaggaagttctttgtgatgtgtgaattcaactcacagagttgaaacttcctttaatagagcagtgttgaaacactctttttctagaatctgcaagtagatatttggagcgcttggaggccttcgttgtaaaccggaatatcttcacaggaaatgtagatagaggcattctcagaaacttttttgtgatatgtagattcaactcacagcgttgaacctttctttggatggagcagttttgaaaaactcttttatcgaatctgcaggtagacattcggggtgctttgagggctgtgctgcaaaaggaaatgtcttcccatagaaactagactgaagcattctcagcaacttcttggtgacgtttgcattcatctcacagtgttgaacatacctttccatagagtagttttgaaacactgtttgtgtagaatcggcaagtggatatttggactgctttgaggccttcatcggaaacgggaatatcttcacataaacactagagagaagcattctcagaaacttctttgtggtctgtgcattcaactcacagagttgaaccttcctttttatggagcagttttgaaaccctgttttcggagaatctgcaagtggatatttggagcgctttgaggcctatggtagaaaaagaaatatctgcctatgacagatagacagaagcattccgagaaaagttctttgtgatgtttgcattcaactagcagagttgaaccttccttttgatagggcagtttggaaacactctttttgtagaatcttcatgtggatatctggagcggtttgaggcctacggtcaaaaaggaaatatcttcctgggaaaaatagacgaaagcattctcagaaactgctttgtgatatgtgcattcgactcaccgagttgaaacttttttttgatagagcagttttggaacactctgtagaatctgaaagtgtatatttggagctctttgagggctatggcggaaaagaaaatatattcacattaaactagacagcagcattctcagaaacttctttaggatgtttgtagtaaactcacagagttgaacatacctttccgtagagcagttttgaaacactctgtttgtgggatccgcaaggggatatttggaccgctttgagacctttgctggaaatgggaatatcttcacatataaactagacagaagcattctcagaaacttcttcgtgatgtgtgcattgtactcccaaatttgaatcttccttctcatggagcagttttgaaacactctgtttgtgcaatctacaattggagaattggaaggcttggatgcccatggtagaaaaggaaatatcctcatataaaaactagacagaaggattcacagaaaatgctttgtgatgtgtgcattcaaatcacggagttgaatctttcttttgttagagcagttttgaaacactgtttctgtggaatctgccagcggacacttggagcgctttgagggctatggtggagaaggaaatatcttcacataaaaactagaaagaagcattctcagaaacatttatgtgaagcgtgcgttcaactcacagagttgaaccttccttttgatagaacaggtttgaaacactcttttgaacaattgcaggtgaatatttggagggctttgaagcctttgttggaaatgggaatatcttcacacacaaactagccagaagcattctcagaaacttctttgtgatgtgtgcattgaacccagagagatgaacctttcctttgatagagcagttttgaaacgtgtttttgtaagatctgcaagcggataattggcttcgctttgtgtcctttggtggaaacgggaatatcttctaataaaaactagacagaaatattctcaaaatctcctttgtgatgtgggcattcaactaacacagttgaacatttcttttcacagagcagttttgaaacactcttttggtagaatctgccagtggatatttggagcgcttggagggctattgtgccaatggtaatatctgcccctgaaaactagacagaagcattctcagaaactgctttgtgatgtttgcattcaactcacagagttgaacctacctcttgatagagcagtttggaaaacctcttcttgtagaatctgcaagtggatattcggaccactttgaggccttcataggaaacaataatatcttcacataaaaactagatagaagcattgtcagaaagttctttgtgatgtgtgaattcaactcacagagttgaaccttcctttaatagagcagttttgaaacactctttttctagaatctgcaagtagatatttggagccctttgaggccttctttggaaaccggaatatcttcacataaaaagtagatagaggcattctcagaaacttttttgtgaaatgtagattcaactcacagcgttgaacctttctttggatggagcagttttgaaaaacccttttatcgaatctgcaggtagacattcggggtgctttgagggctgtggtgcaaaaggaaatgtcttcccatagaaactagactgaagcattctcagcaacttctttgtgacgtttgcattcatctcacagtgttgaacatacctttccatagagtagttttgagacactatttttgtagaatctgcaagtggatatttggactgctttgaggccttcatcggagacgggaatatcttcacataaacactaggcagaagcattctcagaaacttctttgtgatctgtccattcaactcacagagttgaaccttcctttttatggagcagttttgaaacactgtttgtgaagaatctgcaagtggatatttgcagcgccttgaggccaatggtagaaaaagaaatatctgcctctaaatactagactgaagcattctgagaaacttctttgtgatgtttgctttcagctaccagagttgaaccttccttttgatagggcagtttggaaacactctttttgtagaatctgcatgtggatatctggagcgatttgaggcctacggtcaaaaaggaaatatcttcctgggaaaaatagacgaaagcattctcagaaagtgctttgtgatatgcgcattcgactcaccgagttgaaacttttttttgatagagcagttttgaaacactctgtagaatctgaaagtggatatttggagctctttgagggctatggcggaaaagaaaatatattcacattaaagtagacagcagcattctcagaaacttctttaggatgtttgcagtaaactcacagagttgaacatacctttccgtagagcagttttgaaacactctgtttgtgggatccgcaagtggatatttggaccgctttgagacctttgctggaaatgggaatatctgcacatataaactagacagaagcattctcagaaacttcttcgtgatgtgtgcattctcctcccgaatttgaatcttccttttcatgaagcagttttgaaacactctgtttgtgcaatccacaattggataattggaacgctttgatgcccatggtagaaaaggaaatatcctcatataaaaactagacagaaggattcacagaaaatgctttgtgatgtgtgcattcaaatcacggagttgaatctttcttttgttagagcagttttgaaacactgtttctgtggaatctgccagcggacacttggagcgctttgagggctatggtggagaaggaaatatcttcccataaaaactagacagaagcattctcagaaccatttatgtgaagcgtgcattcaactctcagagttgaaccttccttttgttagaacagttttgaaacactcttttgaacaattgcaggtgaatatttggagcgctttgaagcctttgctggaaatgggaatatcttcacgcacaaagtagccagaagcattctcagaaacttctttgtgatgtgtgcgttgaacccagagagatgaacctttcctttgatagagcagttttgaaacgtgtttttgtaaggtcggcaagcggataattggcttcgctttgtgtcctttggtggaaacgggaatatcttctaataaaaactagacagaaatattctcagaatctcctttgtgatgtgggcattcaactaacacagttgaacatttcttttcacagagcagttttgaaacactcttttggtagaatctgccagtggatatgtggagcgcttggagggctattgtgccaatggaaatatctgcccctgaaaactagacagaagcattctcaaaaactgctttgtgatgtttgcattcaactcacagagttgaacatacctcttcatagagcagttttgaaaacctctttttgtagaatctgcaagtggatattcggaccactttgaggccttcatcggaaacagtaatatcatcacataaaaactagatagaagcattgtcagaaagttctttgtgatgtgtgaattcaactcacatagttgaaccttcctttaatagagcagttttaaacactctttttctagaatctgccagtagatatttggagcgctttgaggccttcgttggaaaccggaatatcttcacataaaaagtagatagaggcattctcagaaacttttctgtgatatgtagattcaactcacagcgttgaacctttcttttgatagagcggttttgaaaaactcttatgtcgaatctgcaagtagacatttggagtgctttgagggctgtggtgcaaaaggaaatgtcttcccatagaaactagactgaagcattctcagcaacttctttgtgacgtttgcattcatctcacagtgttgaacatacctttccatagagtagttttgaaacactgtttttgtagaatctgcaagtggatatttggactgctttgaggccttcatcggaaacgggaatatcttcacataaacactagagagaagcattatcagaaacttctttgtggtctgtccattcaactcacagagttgaaccttcctttttatggagcagttttgaaacactgttttcggagaatctgcaagtggatatttggagcgctttgaggcctatggtagaaaaagaaatatctgcctatgacaactagacagaagcattctgagaaacttctttgtgatgtttgcattcaactaccagaggtgaaccttccttttcatagggcagtttggaaacactctttttgtagaatctgcatgtggatatctggagcgatttgaggcctacggtccaaaaggaaatatcttccggggaaaaatagacgaaagcattctcagaaactgctttgtgatatgtgcattcgactctccgagttgaaactttttttggatagagcagttttgaaacactctgtaggatctgaaagtggatatttggagctctttgagggctatggcggaaaagaaaatatattcacattaaactagacagcagcattctcagaaacttctttaggatgtttgtagtaaactcacagagttgaacatacctttccgtagagcagttttgaaacactctgtttgtgggatccgcaagtggatatttggaccgctttgagacctttgctggaaatgggaatatcttcacatataaactagacagaagcattctcagaaacttcttcgtgatgtgtgcattctactcccaaatttgaatcttccttctcatgaagcagttttgaaacactctatttgtgcaatctacaattggataattggaaccctttgatgcccatggtagaaaaggaaatatcctcatatgaaaactagacagaaggattcacagaaaatgctttgtgatgtgtgcattcaaatcacggagttgaatctttcttttgttagagcagttttgaaacacagtttctgtggaatctgccagcggacacttggagcgctttgagggctacggtggagaaggaaatatcttcacataaaaactagaaagaagcattctcagaaacatttatgtgaagcgtgcattcaactcacagagttgaaccttccttttgatacaacagttttgaaacactctttggaacaattgcaggtgaatctttggagcgctttgaagcctttgttgcaaatgggaatatcttcacacacaaactagccagaagcattctcagaaacttctttgtgatgtgtgcgttgtacccagagagatgaacctttccttcgatagagcagttttgaaacgtgtttttgtaagatcggcaagcggataattggcttcgctttgtgtcctttggtggaaacgggaatatcttctaataaaaactagacagagatattctcagaaacttctttgtgatgtgggcattcaagtaacacagttgaacatttcttttcacagagcagttttgaaacactcttttggtcgaatctgccagtggatatttggagtgctttgagggctattgtgccaatggaaatatctgcccctaaaaactagacagaagcattctcagaaactgcttcgtgatgtttgcattcaacacacagagttgaacatacctcttcacagagcagttttgaaaacctctttctgtagaatctgcaagtggatattcggaccactttgaggccttcataggaaacagtaatatcttcacataaaaactagatagaagcattgtcagaaagttctttgtgatgtgtgaattcaactcacagaattgaaccttccttcagcagagcagttgtgaaacactctttttctagaatctgcaagtagatatttggagcgctttgaggccttcgttggaaaccggaatatcttcacaggaaaagtagatagaggcattctcagaaacttttttgtgatatgtagattcaactcacagcgttgaacctttctttggatggagcagttttgaaaaattctttaatcgaatctgcaggtagacatttggggtgctttgagggctgtggtgcaaaaggaaatgtcttcccatagaaactagactgaagcattctcagcaacttctttgtgacgtttgcattcatctcacagtgttgtacatacctttccatcgagtacttttgaaacactgtttttgtagaatctgcaagtggatatttggactgctttgaggccttcatcggaaacgggaatatcttcacataaacactagagagaagcattctcagaaacttctttgtcatctgtccattcaactcacagagttgaaccttcctttttatggagcagttttgaaacactccttttggagaatctgcaagtggatatttggagcactttgaggcctatggtagaaaaagaaatatctgcctctaaaaaccagacagaagcattccgagaaactcctttgtgatgtttgcattcaactagcagagttgaaccttccttttgatagggcagtttggaaacactctttttgtagaatctgcatgtggatatctggagcggtttgaggcctacggtcaaaaaggaaatatcttcctgggaaaaatagacgaaagcattctcagaaactgctttgtgatatgtgcattcgactcaccgagttgaaacttttttttgatagagcagttttgaaacactctgtagaatctgaaagtggatatttggagctctttgagggctatggcggaaaagaaaatatattcacattaaagtagacagcagcattctcagaaacttctttaggatgtctgcagtaaactcacagagttgaacatacctttccatagagcagttttgaaacactctgtttgtgggatccgcaagtggatatttggacagctttgagatctttgctggaaatgggaatatcttcacatataaactagacagaagcattctcagaaacttcttcgtgatgtgtgcattctactcccaaatttgaatcttccttctcatgaagcagtttggaaacactctatttgtgcaatctacaattggataattggaaccctttgatgcccatggtagaaaaggaaatatcctcatataaaaactagacagaaggattcacagaaaatgctttgtgatgtgttcattcaaatcacggtgttgaatcttattttgttagagcagttttgaaacactgtttctgtggaatctgcccgcggacacttggagcgctttgagggctatggtggagaaggaaatatcttcacataaaaactagaaagaagaattctcggaaacatttatgtgaagcgtgcattcaactcacagagttgaacctttcttttgatagaacagttttgaaacactcttttgaacaattgcaggtgaatctttggagcgctttgaagcctttgttggaaatgggaatatcttcacacacaaactagccagaagcattctcagaaacttctttgtgatgtgtgcgttgaacccagagagatgaacctttccttcgatagagcagttttgaaacgtgtttttgtaagatcggcaagcggataattggcttcgctttgtgtcctttggtggaaacgggaatatcttctaataaaaactagacagaaatattctcagaatctcctttgtgatgtgggcattcaactaacacagttgaacatttcttttcacagagcagttttgaaacactcttttggtagaatctgccagtggatatttggagtgtttggagggctattgtgccaatggaaatatctgccactgaaatctagacagaagcattctcagaaactacttcgtgatgtttgcattcaacacacagagttgaacataccccttcacagagcagttttgaaaacctctttctgtagaatctgcaagtggatattcggaccactttgaggccttcataagaaacagtaatatcttcacataaaaactagatagaagcattgtcagaaagttctttgtgatgtgtgaattcaactcacagaattgaaccttccttcaatagagcagttgtgaaacactctttttctagaatctgcaagtagatatttggagcgctttgaggccttcgttggaaaccggaatatcttcacaggaaaagtagatagaggcattctcagaaactttttcgtgttatgtggattcaactcacagcgttgaacatttcttttgatagagcagttttgtaaaactcttttatcgaatctgcaagtagacatttggagtgctttgagggctgtggtgcaaaaggaaatgtcttcccatagaaactagactgaagcattctcatcaacttctttgtgacgtttgcattcatctcacagtgttgaacattcctttccatagggtagttttgaagcactatttttgcagaatctgcaagtggatatttggactgctttgaggccttcatcggaaacgggaatatcttcacataaacactagacagaagcattctcagaaacttctttgtggtctgtccattcaactcacagagttgaaccttcctttttatggagcagttttgaaacactgttttcggaggatctgcaagtggatatttggagcgctttgaggcctattgtagaaaaagaaatatctgcctatgacaactagacagaagcattccgagaaacttctctgtgatgtttgcattcaactagcagagttgaaccttccttttgatagggcagtttggaaacactctttttgtagaatctgcatgtggatatctggagcggtttgaggcctacggtcaaaaaggaaatatcttcctgggaaaaatagacgaaagtattctcagaaactgctttgtgatatgtgcattcgactcaccgagttgaaactttttttggatagagcagttttgaaacactctgtagaatctgaaggtggatatttggagctctttgagggctatggcggaaaagaaaagatattcacattaaactagacagcagcattctcagaaacttctttaggatgtttgcggtaaactcacagagttgaacctacctttccatagagcagttttgaaacactctgtttgtgggatccgcaagtggatatttggaccgctttgaggcctttgctggaaatgggaatatcttcacatataaactagacagaagcattctcagtaacttcttcgtgatgtgtgcattctactcccgaatttgaatcttccttttcatgaagcagttttgaaacactctgtttgtgcaatccacaattggataattggaacgctttgatgcccatggtagaaaaggaaatatcctcatataaaaactagacacaaggattcacagaaaatgctttgtgatgtgtgcattcaaatcacggagttgaatctttcttttgtcagagcagttttgaaacactgtttctgtggaatctgccagcggacacttggagcgctttgagggttgtggtggagaaggaaatatcttcccataaaaactagaaagaagcattctcagaaccatttatgtgaagcgtgcattcaactcacagagttgaaccttccttttgatagaacagttttgaaacactcttttgaacaattgcaggtgaatatttggagggctttgaagcctttgttggaaacgggaatatcttcacacacaaactagccagaagcattctcagaaacttctttgtgatgtgtgcgttgaacccagagagatgaacctttcctttgatagagcagttttgaaacgtgtttttgtaagatctgcaagcggataattggcttcgctttgtgtcctttgttggaaacgggaatatcttctaataaaaactagacagaaatattctcagaatcttctttgtgatgtgggcattcaactaacagagttgaacatttcttgtgacagagcagttttgaaacactctttttgtagaatctgccagtggatatttggagcgctttgagggctttgtagaaatggaaaagtcttcacctaaaaactagacagaagcattctcagaaactgcttcgggatgtttgcattcaactcacagagttgaatatacctctgcatagagcagttttgaaaacctctttttgtagaatctgcaagtggatattcggaccactttgaggccttcatgggaaacagtaatatcttcacataaaaactagatagaagcatagtcagaaagttctttgtgatgtgtgaattcaaatcacagaattgaaacttcctttaatagagcagttttgaaacactctttttctagaatctggaagtagatatttggagcgctttgaggccttcgttggaaaccggaatatcttcacataaaaagcagatagaggcattctcagaaactttttcgtgatatgtggattcaactcacagcgttgaacctttcttttgatagagcagttttgtaaaactcttttatcgaatctgcaagtagacatttggagtgctttgagggctgtggtgcaaaaggaaatgtcttcccatagaaactagattgaagcattctcagcaacttcttggtgacgtttgcattcatctcacagtgttgaacatacctttccatagagtggttttgaaacactgtttctgtagaatctgcaagtggatatttggactgctttgaggccttcatcggaaacgggaatatcttcacataaacactagagagaagcattctcagaaacttctttgtggtctgtccattcaactcacagagttgaaccttcctttttatggagcagttttgaaacactgttttcggaggatctgcaagtggatatttggagcgctttgaggcctacggtagaaaaagaaatatctgcctatgacaactagacagaagcattctgagaaacttctttgtgatgtttgcattcaactagcagagttgaaccttccttttgatagggcagtttggaaacactctttttgtagaatctgcatgtggatatctggagcgatttgaggcctacggtcaaaaaggaaatatcttcctgggaaaaatagacgaaagcattctcacaaagtgctttgtgatatgtgcattcgactcaccgagttgaaacttttttttgatagagcagttttgaaacactctgtagaatctgaaagtggatatttggagctctttgagggctatggcggaaaagaaaatatattcatattaaactagacagcagcattctcagaaacctctttaggatgtttgcagtaaactcacagagttgaacatacctttccgtagagcagttttgaaacactctgtttgtgggatccgcaagtggatatttggaccgctttgagacctttgctggaaatgcgaatatctgcacatataaactagacagaagcattctcagaaacttcttcgtgatgtgtgcattctactcccaaatatgaatcttccttttcatgaagcagttttgaaacactctatttgtgcattctacaattggatgattggaacgctttgatgcccatggtagaaaaggaaatatcctcatataaaaactagacagaaggattcacagaaaatgctttgtgatgtgtgcattcaaatcacggagttgcatctttcttttgtgagagcagttttgaaacactgtttctgtggaatctgccagcggacacttggagcgctttgagggctatggtggagaaggaaatatcttcccataaaaactagaaagaagcattctcggaaacatttatgtgaagcgtgcattcaactcacagagttgaacctttcttttgagagaacagttttgaaacactcttttgaacaattgcaggtgaatctttggagcgctttgaagcctttgttggaaatgggaatatcttcacacacaaactagccagaagtattctcagaaacttctttgtgatgtgtgcgttgaacccagagagatgaacctttccttggatagagcagttttgaaacgtgtttttgtaagttctacaagcggataattggcttcgctttgtgtcctttggtggaaacgggaatatcttctaataaaaactagacagaaatattctcagaatctcctttgtgatgtgggcattcaactaacacagttgaacatttcttttcacagagcagttttgaaacactcttttggtagaatctgccagtggatatttggagcgcttggagggctattgtgccaatggtaatatctgcccctgaaaactagacagaagcattctcagtaaactgctttgtgatgtttgcattcaactcacagagttgaacataccttttcatagagcagttttgaaaacctctttttgtagaatctgcaagaggatattcggaccactttgaggccttcataggaaacagtaatatcttcgcataaaaactagatagaagcattgtcagaaagttctttgtgatgtgtgaattcaactcacagagttgaaccttcctttaatagagcagttttgaaacactccttttctagaatctgcaagtagatatttggagcgctttgaggccttcgttggaaaccggaatatcttcacaggaaaagtagatagaggcattctcagaaacttttttgtgataagtagattcaactcacagcgttgaacctttcttttgatagagcagttttgaaaaactcttttatcgaatctgcaagtagacatttggagtgctttgagggctgtggtgcaaaaggaaatgtcttcccatagaaactagactgaagcattctcagcaacttctttgtgacgtttgcattcatctcacagtgttgaacatacctttccatagagtagttttgaaacactatttttgtagaatctgcaagtggatatttggactgctttgaggtcttcatcggaaacgggaatatcttcacataaacactagacagaagcattctcagaaacttctttgtgatctgtccattcaactcacagagttgaaccttcctttttatggagcagttttgaaacactgtttttggagaatctgcaagtggatatttggagcgctttgaggcctatggtagaaaaagaaatatctgcctctaaaaactagacagaagcattctcagaaactgctttgtgatatgtgcattcgactcaccgagttgaaattttttttgatagagcagttttgaaacactctgtagaatctgaaagtggatatttggagctctttgagggctatggcggaaaagaaaatatattcacattaaagtagacagcagcattcccagaaacttccttaggatgtttgcagtaaactcacagagttgagcattcctttccgtagagcagttttgaaacactctgtttgtgggatccgcaagtggacatttggaccgctttgagacctttgctggaaatgggaatatcttcacatataaactggacagaagcattctcagaagcttcttcgtgatgtgtgcattctactcccaaatttgaatcttccttttcatgaagcagttttgaaacactctgtttgtgcaatccacaattggataattggaaagctttgatgcccatggtagaaaaggaaatatcctcatataaaaactagacagaaggattcacagaaaatgctttgtgatgtgtgcattcaaatcacggagttgaatctttcttttgttagagcagatttgaaagactgtttctgtggaatctgccagcggacacttggagcgctttgagggctacggtggagaaggaaatatcttcacataaaaactagaaagaagcattctcagaaccatttatgtgaagcgtcctttcaactcacagagttgaaccttccttttgatagaacagttttgaaacactcttttgaacaattgcaggtgaatatttggagggctttgaagcctttgttggaaatgggaatatcttcacacacaaactagccagaagctttctcagaaacttctttgtgatgtgtgcgttgaacccagagagatcaacctttcctttgatagagcagttttgaaacgtgtttttgtaagatctgcaagcggatagttggcttcgctttgtgtcctttggtggaaacgggaatatcttctaataaaaactagacagaaatattctcacaatctcctttgtgatgtgggcattcaactaacacagttgaacatttcttttcacagagcagttttgaaacactcttttggtagaatctgccagtggatatttggagcgctttgagggctgttgtgccaatggaaatatctgcccctaaaatctagacagaagcattctcagaaactacttcgtgatgtttgcattcaactcacagagttgaacataactcttcatagagcaattttgaaaacctctttttggagaatctgcaagtggatattcagaccactttgaggccttcataggaaacagtaatatcttcacataaaaactatatagaagcattgtcagaaagttctttgtgatgtgtgaattcaactcacagagttgaaccttccttcaattgagcagttgtgaaacactctttttctagaatctgcaagtagatatttggagcgctttgaggccttcgttggaaaccggaatatcttcacaggaaaagtagatagaggcattctcagaaactttttcgtgatatgtggattcaactcacagcgttgaacctttcttttgatagagcagttttgtaaaactcttttatcgaatctgcatgtagacatttggagtgctttgggggctgtggtgcaaaaggaaatgtcttcccatagaaactagactgaagcattctcagcaacttcttggtgacgtttgcattcatctcacagtgttgaacatacctttccatagagtagttttgaaacactgtttttgtagaatcggtaagtggatatttggactgctttgaggccttcatcggaaacgggaatatcttcacataaacactagagagaagcattctcagaaacttctttgtgatctgtccattcaactcagagagttgaaccttcctttttatggagcagttttgaaacactgtttgtggagaatctgcaagtggatatttggagcgccttgaggccaatggtagaaaaagaaatatctgcctctaaatactagactgaagcattctgagaaacttctttgtgatgtttgccttcaactaccagagttgaaccttccttttgatagggcagtttggaaacactctttttgtagaatctgcatgtggatatctggagcgatttgaggcctacggtccaaaaggaaatatcttcctgggaaaaatagacgaaagcattctcagaaactgctttgtgatatgtgcattcgactcacctagttgaaactttttttggatagagcagttttgaaacactctgtagaatctgaaagtggatatttggagctctttgagggctatggcggaaaagaaaatatattcacattaaactagacagcagcattctcagaaacttctttaggatgtttgcagtaaactcacagagttgaacatacctttcggtagagcagttttgaaacactgtttgtgggatccgcaagtggatatttggaccgctttgagacctttgctggaaatgggaatatcttcacatataaactagacggaagcattctcagaaacttcttcgtgatgtgtgcattctactcccagatttgaatcttccttctcatgaagcagttttgaaacactctatttgtgcaagctacaattggataattggaacgctttgatgcccatggtagagaaggaaatatcctcatataaaaactagacagaaggattcacagaaaatgctttgtgatgtgtgcattcaaatcacggagttgaatatttcttttgttagagcagttttgaaacactgtttctgtggaatctgccagcggacacttggagcgctttgagggctatggtggagaaggaaatatcttcacataaaaactagaaagaagcattctcagaaccatttatgtgaagcgtgcgttcaactcacagagttgaaccttccttttgatagaacagttttgaaacactcttttgaacaattgcaggtgaatatttggagggctttgaagcctttgttggaaatgggaatatcgtcacacacaaactagccagaagcattctcggaaacttctttgtgatgtgtgcgttgaacccagagagatgaacctttcctttgatagagcagttttgaaacgtgtttttgtaagatctgcaagcagataattggcttcgctttgtgtcctttggtggaaacgggaatatcttctaataaaaactagacagaaatattctcagaatcttctttgtgatgtgggcattcaactaacacagttgaacgtttcttttcacagagcagttttgaaacactcttttggtagaatctgccagtggatatttggagcgctttgagggctattgtgccaacgaaaatatctgcccctaaaaactagacagaagcattctcagaaactgctttgtgatgtttgcattcaactcacagagttgaacctaccttttcatagagcagttttgaaaacctctttttgtagaatctgcaagaggatattcggaccactttgaggccttcataggaaacagtaatatcttcacataaaaactagatagaagcattgtcagaaagttctttgtgatgtgtgaattcaactcacagagttgaaccttcctttaatagagcagttgtgaaacactctttttctagaatctgcaagtagatatttggagcgctttgaggccttcgttggaaaccggaatatcttcacaggaaaattagatagaggcattctcagaaactttttttgtgatatgtagattcaactcacagtgttgaacctttctttggatggagcagttttgaaaaactcttttatcgaatctgcaggtagacatttggggtgctttgagggctgtggtgcaaaaggaaatgtcttctcatagaaactagactgaagcattctcagcaacttctttgtgacgtttgcattcatctcacagtgttgaacataccttttcatagagtagttttgaaacactatttttgtagaatctgcaagtggatatttggactgctctgaggccttcatcggaaacgggaatatcttcacataaacactagacagaagcattctcagaaacttctttgtcatctgtccattcaactcacagagttgaaccttcctttttatggagcagttttgaaacactccttttggagaatctgcaaatggatatttggagcgctttgaggcctatggtagaaaaagaaatatctgcctctaaaaaccagacagaagcattctgagaaacttctttgtgatgtttgcattcaactaccagagttgaaccttccttttgatagggcagtttggaaacactctttttgtagaatctgcatgtggatatctggagcgatttgaggcctacggtcaaaaaggaaatatcttcctgggaaaaatagatgaaagcattctcagaaactgctttgtgatatgtgcattccactcaccgagttgaaacttttttttgatagagcagttttgaaacactctgtagaatctgaaagtggatatttggagctctttgagggctatggcggaaaagaaaatatattcacattaaagtagacagcagcgttctcagaaacttctttaagatgtttgcagtaaactcacagagttgaacatacctttccgtagagcagttttgaaacactctgtttgtgggatccgcaagtggatatttggaccgctttgagacctttgctggaaatgggaatatctgcacatttaaactagacagaagcattctcagaaacttcttcgtgatgtgtgcattctactcccgaatgtgaatcttccttttcatgaagcagttttgaaacactctgtttctgcaatccacaattggataattggaacgctttgatgcccatggtagaaaaggaaatatcttcatataaaaactagacagaaggattcacagaaaatgctttgtgatgtgtgcattcaaatcacggagttgaatctttcttttgtgagagcagttttgaaacactgtttctgtggaatctgccagcggacacttggagcgcttttagggctatggtggagaaggaaatatcttcccataaaaactagaaagaagcattctcagaaccatttatgtgaagcgtgcattcaactcacagagttgaaccttccttttgatagaacagttttgaaacactcttttgaacaattgcaggtgaatctttggagggctttgaagcctttgttggaaatgggaatatcttcacacacaaactagccagaagcattctcagaaacttctttgtgatgtgtgcgttgaacccagagagatgaaccattcctttgatagagcagttttgaaacgtgtttttgtaagatctgcaagcggatagttggcttcggctttgtgtcctttggtggaaacgggaatatcttctaataaaaactagacagaaaatattctcagaatctcctttgtgatgtgggcattcaacttacacagttgaacatttcttttcacagagcagttttgaaacactcttttggtagaatctgccagtggatatttggagcgcttggagggctattgtgccaatggaaatatctgcccctgaaaactagacagaagcattctcagaaactacttcgtgatgtttgcattcaacacacagagttgaacatacctcttcacagagcagttttgaaaacctctttctgtagaatctgcaagtggatattcagaccactttgaggccttcataggaaacagtaatatcttcacataaaaactagatagaagcattgtcagaaagttctttgtgatgtgtgaattcaactcacagagttgaaccttcctttaatagagcagttttgaaacactctttttctagaatctgcaagtagatatttggagcgcttggaggccttcgttggaaaccggaatatcttcacaggaaaagtagatagaggcattctcagaatctttttcgtgttatgtggattcaactcacagcgttgaacctttcttttgatagagcagttttgtaaaactcttttatcgaatctgcaagtagacatttggagtgctttcagggctgtggtgcaaaaggaaatgtcttcccatagaaactagactgaagcattctcagcaacttcttggtgacgtttgcattcatctcacagtgttgaacatacctttccatagagtggttttgaaacactgtttttgtagaatcggcaagtggatatttggactgctttgaggccttcatcggaaacgggaatatcttcacataaacatagagagaagcattctcaggaaacttctttgtgatctgtccattcaactcacagagttgaaccttcctttttatggagcagttttgaaacactgtttgtggagaatctgcaagtggatatttggagcgccttgaggccaatggtagaaaaagaaatatctgcctctaaatactagactgaagcattccgagaaacttctttgtgatgtttgcattcaactagcagagttgaaccttccttttgatagggcagtttgggaacactctttttgtaaaatctgcatgtggatatctggagcggtttgaggcctacggtcaaaaaggaaatatcttcctgagaaaaatagacgaaagcattctcagaaactgctttgtgatatgtgcattcgactcaccgagttgaaacttttttttgatagagcagttttgaaacactctgtagaatctgaaagtggatatttggagctcgttgagggctatggcggaaaagaaaagatattcacattaaactagacagcagcattctcagaaacttctttaggatgtttgcagtaaactcacagagttgaacatacctttccgtagagcagttttgaaacactctgtttgtgggatccgcaagtggatatttggaccgctttgagacctttgctgcaaatggggatatcttcacgtataaactagacagaagcattctcagaaacttcttcgtgatgtgtgcagtctactcccgaatttgaatcttccttttcatgaagcagttttgaaacactctgtttgtgcaatccacaattggataattggaacgctttgatgcccatggtagaaaaggaaatatcctcatataaaaactagacagaaggattcacagaaaatgctttgtgatgtgtgcattcaaatcacggagttgaatctttcttttgtcagaccagttttgaaacactgtttctgtggaatctgccagcggacacttggagcgctttgagggctatggtggagaaggaaatatcttcccctaaaaactagaaagaagcattctcggaaacatttatgtgaagcgtgcattcaactcacagagttgaaccttccttttgatagaacagttttgaaacactcttttgaacaattgcaggggaatctttggagcgctttgaagcctttgttggaaatgggaatatcttcacacacaaactagccagaagcattctcagaaacttctttgtgatgtgtgcgttgaacccagagagatgaacctttcctttgatagagcagttttgaaacgtgtttttgtaagatctgtaagcggatagttggcttcgctttgtgtcctttggtggaaacgggaatatcttctaataaaaactagacagaaatattctcacaatctcctttgtgatgtgggcattcaactaacacagttgaacatgtcttttcacagagcagttttgaaacactcttttggtagtatctgccagtggatatttggagcgctttgagggctgttgtgccaatggaaatatctgcccttaaaatctagacagaagcattctcagaaactacttcgtgatgtctgcattcaacacacagagttgaacatacctcttcacagagcagttttgaaaacctctttctgtagaatctgcaagtggatattcggaccactttgagcccttcataggaaacagtaatatcttcacataaaaactagatagaagcatagtcagaaagttctttgtgatgtgtgaattcaaatcacagagttgaaccttcctttaatagagcagttttgaaacactctttttctagaatctgcaagtagatatttggagcgctttgaggccttcgttggaaaccggaatatcttcacataaaaagcagatagtggcatgctcagaaacttttttgtcatatgtagattcaactcacaacgttgaacctttcttttgatagagcagttttgaaaaactcttttatcgaatctgcaagtagacatttggagtgctttgagggctgtggtgcaaaaggaaatgtcttcccatagaaactagactgaagcattctcagcaacttcttggtgacgtttgcatgcatctcacagtgttgaacatacctttgcatagagcggttttgaaacactatttttgtagaatctgcaagtggatatttggactgctttgaggccttcatcggaaacgggaatatcttcacataaacactagacagaagcattctcagaaacttctttgtggtctgtccattcatctcacagagttgaaccttcttttttatggagcagttttgaaacactgttttcggagaatctgcaagtggatatttggagcgctttgaggcctatggtagaaaaagaaatatctgcctatgacaactagacagaagcattccgagaaacttctttgtgatgtttgcattcaactagcagaggtgaaccttccttttgatagggcagtttggaaacactctttttgtagaatctgcatgtggatatctggagcggtttgaggcctacggtcaaaaaggaaatatcttcctgggaaaaatagacgaaagcattctcagaaactgctttgtgatatgtgcattccactcaccgagttgaaacttttttttgatagagcagttttgaaacactctgtagaatctgaaagtggatatttggagctctttgagggctatggcggaaaagaaaatatattcacattagactagagaggagcattctcagaaacttctttaggatgtttgcagtaaactcacagagttgaacataaatttccgtagagcagttttgaaacactctgtttgtgggatccgcaaggggatatttggaccgctttgagacctttgctggaaatgggaatatcttcacatataaactagacagaagcattctcagaaacttcttcgtgatgtgtgcattctactcccaaatttgaatcttccttttcatgaagcagttttgaaacactctatttgtagaatctacaattggatatttggaactctttgatgcccatggtagaaaaggaaatatcctcatataaaaactagacagaaggattcacagaaaatgctttgtgatgtgtgcattcatatcacggagttgaacctttctcttgctagagcagttttgaaacactgtctctgtggaatctgcctgcggacacttggagcgctttgagggctatggtagagaaggaaatatcttcagataaaaactagaaagaagaattctcagaaccatttatgtgaagcgtgcattcaactcacagagttgaaccttccttttgatagaacagttttgaaacactcttttgaacaattgcaggtgaatatttggagggctttgaagcctttgttggaaacgggaatatcttcacacacgaactagccagaagcattctcacaaacttctttgtgatgtgtgcgttgaacccagagagatgaacctttcctttgatagagcagttttgaaacgtgtttttgtaagatctgcaagcggataattggcttcgctttgtgtcctttggtggaaacgggaatatcttctaataaaaactagacagaaatattctcagaatctcctttgtgatgtgggcattcaactaacacagttgaacatttcttttcacagagcagttttgaaacactcttttggtagaatctgccagtggatatttggagcgcttggagggctattgtgccaatggaaatatctgcccctgaaatctggacagaagcattctcagaaactacgttgtgatgtttgcattcaactcacagtgttgaacatacctcttcatagagcagttttgaaaacctcttttggtagaatctgcaagtggatatttggaccactttgaggtcttcataggaaacagtaatatcttcacataaaaactagatggaagcattgtcagaaagttctttgtgatgtgtgaattcaactcacagagttgaaccttcctttaatagagcagttgtgaaacactctttttctagaatctgcaggtagatatgtggagcgctttgaggccttcgttggaaaccggaatatcttcacaggaaaagtagatagaggcattctcagaaacttttttgtgatatgtagattcaactcacagcgttgaacctttctttggatggagcagttttgaaaatcccttttatcgaatctgcaggtagacatttggggtgctttgagggctgtggtgcaaaaggaaatgtcttcccatagaaactagactgcagccttctcagcaacttctttgtgacgtttgcattcatctcacagtgttgaacatacctttccatagagtagttttgaagcactatttttgtagaatctgcaagtggatatttggactgctttgaggccttcatcggaaacgggaatatcttcacataaacactagacagaagcattctcagaaacttctttgtcatctgtccattcaactcacagagttgaaacttcctttttatggagcagttttgaaacactccttttggagaatctgcaggtggatatttggagcgctttgaggcctatggtagaaaaagaaatatctgcctctaaaaaccagacagaagcattccgagaaacttctttgtgatgtttgcattcaactagcagagttgaaccttccttttgatagggcagtttggatacactctttttgtagaatctgcatgtggatatctggagcggtttgaggcctacggtcaaaaaggaaatatcttcctgggaaaaatagacgaaaacattctcagaaagtgctttgtgatatgtgcattcgactcaccgagttgaaacttttttttgatagagcagttttgaaacactctgtagaatctgaaagtggatatttggagctctttgagggctatggcggaaaagaaaatatattcacattaaagtagacagcagcattctcagaaacttctttaggatgtttgcagtaaactcacagagttgaacttacctttccgtagagcagttttgaaacactctgtttgtgggatccgcaagtggatatttggaccgctttgagacctttgctggaaatgggaatatcttcacatataaactagacagaagcattctcagaaacttcttggtgatgtgtgcattgtactcccaaatttgaatcttccttctcatggagcagttttgaaacactctgtttgtgcaatctacaattggagaattggaacgcttggatgcccgtggtagaaaaagaaatatcctcatataaaaactagacagaaggattcacagaaaatcctttgtgatgtgtgcattcaaatcacggagttgaatctttcttttgtcagagcagttttgaaacactgtttctgtggaatctgccagcggacacttggagcgctttgagggctgtggtggagaaggaaatatcttcccataaaaactagaaagaagcattctcagagccatttatgtgaagcgtgcattcaactcacagagttgaaccttccttttgatagaacagtttttaaacactcttttgaacaattgcacgtgaatatttggagggctttgaagcctttgttggaaatgggaatatcttcacacacaaactagccagaagcattctcagaaacttctttgtgatgtgtgcgttgaacccagagagatgaacctttcctttgaaagagcagttttgaaacgtgtttttgtaagatctgcaagcggatagttggcttcgctttgtgtcctttggtggaaacgggaatatcttctaataaaatctagacagaaatattctcagaatcttctttgtgatgtgggcattcaactaacacagttgaacgtttctttgcacagagcagttttgaaacactcttttggtagaatctgccagtggatatttggagcgctttgagggctattgtgccaacggaaatatctgcccctaaaaactagacagaagcattctcagaaactgctttgtgatgtttgcattcaactcacagacttgaacatacctctgcatagagcacttttggaaacctctttttgtagaatctgcaagtggatattcggaacactctgaggccttcataggaaacagtaatatcttcacataaaaaatagataaaagcattgtcagaaagttctttgtgatgtgtgaattcaactcacagagttgaaccttcctttcatagagcagttttgaaacactctttttctagaatctgcaagtagatatttagagcgctttgaggccttcgttggaaaccggactatcttcacgtaaaaagtagatagaggcattctcagaaaacttttttgtgatatgtagattccactcacagcgttgaacctttcttttgatagagcagttttgaaaaattcttttatcgaatctgcaagtagacatttggggtgctttgagggctgtggtgcaaaaggaaatgtcttcccatggaaactagactgaagcattctcagcaacttcttcgtgaggtttgcactcatctcacagtgttgaacagacctttccatagagtagttttgaaacactatttttgtagaatctgcaactggatatttggactgctttgaggccttcatcggaaacgggaatatcttcacataaacactagagagaagcattctcagaaacttctttgtcatctgtccattcaactcacagagttgaacctacctttttatggagcagttttgaaacactccttttggagaatctgcaagtggatatttggagcgctttgaggcctatggtagaaaaagaaatatctgcctctaaaaaccagacagaagcattctgagaaaagttctttgtgatgtttgcattcaactaggcagagttgaaccttccttttgatagggcagtttggaaacactctttttgtagaatcttcatgtggatatctggagcggtttgaggcctacggtcaaaaaggaaatatcttcctgggaaaaatagacgaaagcattctcagaaagggctttgtgatatgcgcattcgactcaccgagttgaaacttttttttgatacagcagttttgtaacactctgtagaatctgaaagtggatatttggagctctttgagggctatggcggaaaagaaaatatattcacattaaagtagacagcagcattctcagaaacttctttatgatgtttgcatcaaactcacagagttgaacatacctttccatagagcagttttgaaacactctttttgtggaatccgcaagtggatatttggaccgctttgagaccttcgctggaaatgggaatatcttcacatataaactggactgaagcattctcagaaacttcttcgtgatgtgtgcattctactcccaaatatgaatcttccttttcatgaagcagttttgaaacactctatttgtgcattctacaattggatgattggaacgctttgatgtccatggtagaaaaggaaatatcctcatataaaaactagacagaaggattcacagaaaatgttttgtgatgtgggcattcaaatcacggagttgaatctttcttttgttagagcagttttgaaacactgtttctgtggaatctgccagcagacacttggagcgctttgagggctgtggtggagaaggaaatatcttcccataaaaactagaaagaagcattctcagaaacatttatgtgaagcgtgcattcaactcacagagttgaaccttccttttgatagaacagttttgaaacactcttttgaacaattgcaggtgaatctttggagcgctttgaagcctttgttggaaatgggaatatcttcacacacaaactagccagaagcattctcagaaacttctttgtgatgtgtgtgttgaacccagagagatgaacctttcctttgatagagcagttttgaaacgtgtttttgtaagatctgcaagcggataattggcttcgctttgtgtcctttggtggaaacgggaatatcttctaataaaaactagacagaaatattctcagaatcttctttgtgatgtgggcattcagctaacacagttgaacgtttcttttcacagagcagttttgaaacactcttttggtagaatctgccagtggatatttggagcgctttgagggctaatgtgccaatggaaatatctgcccctaaaaactagacagaagcattctcagaaactacattgtgatgtttgcattcgactcacagagttgaacatacctcttcatagagcagtttttaaaaccttttttgtagaacctgaaagttgatattcggaccactttgaagccttcataggaaacagtaatatcttcacataaaacctagatagaagcattgtcagaaagttctttgtgatgtgtgaattcaactcacagagttgaaccttcctttaatagagcagttttgaaacactctttttctagaatctgccagtagataattggagcgctttgaggccttcgttggaaaccggaatatcttcacataaaaagtagatagaggcattctcagaaactttttcgtgatatgtggattcaactcacagcgttgaaactttcttttgatagagcagttttgtaaaactcttttatcgaatctgcaagtagacatttggagtgctttgagggctgtggtgcaaaaggaaatgtcttcccatagaaactagactgaagcattctcagcaacttctttgtgacgtttgcattcaaatcacagtgttgaacatacctttgcatagagtagttttgaaacactatttttgtagaatctgcaagtggatatttggactgctttgaggccttcatcggaaacgggaatatcttcacataaacactggacagaagcattctcagaaacttctttgtggtctgtccattcaactcacagagttgaaccttcctttttatggagcagttttgaaacactgtttttggagaatctgcaagtggatatttggagcgctttgaggcctatggtagaaaaagaaatatctgcctatgacaactagacagaagcattccgagaaacttctttgtgatgtttgcattcaactagcagagttgaaccttccttttggtagggcagtttggaaacactctttttgtagaatctgcatgtggatatctggagcggtttgaggcctacggtcaaaaaggaaatatcttcctgggaaaaatagacgaaagcattctcagaaagtgctttgtgatatgtgcattcgactcaccgagttgaaacttttttttgatagagcagttttgaaacactctgtagaatctgaaagtggatatttggagctctttgagggctatggcggaaaagaaaatatattcacattaaaaaagtagacagcagcattctcagaaacttctttaggatgtttgcagtaaactcacagagttgaacatacctttccgtagagcagttttgaaacactctgtttgtgggatccgcaagtggatatttggacccctttgagacctttgctggaaacgggaatatcttcacatataaactagacagaagcattctcagaaacttcttcgtgatgtgtgcattgtactcccaaatttgaatcttccttctcatggagcagttttgaaacactctgtttgtgcaatctacaattggagaattggaaggcttggatgcccgtggtagaaaaggaaatatcctcatataaaaactagacagaaggattcacagaaaatgctttgtgatgtgtgcattcaaatcgcggagttgaatctttcttttgttagagcagttttgaaacactgtttctgtggaatctgccagcggacacttggagcgctttgagggctatggtggagaaggaaatatgttcacataaaaactagaaagaagcattctcagaaacatttatgtgaagcgtgcattcaactcacagagttgaaccttcctttcgatacaacagttttgaaacactcttttgaacaattgcaggtgaatctttggagcgctttgaagcctttgttggaaatgggaatatcttcacacacaaactagccagaagcattctcagaaacttctttgtgatgtgtgcgttgaacccagagagatgaacctttccttggatagagcagttttgaaacgtgtttttgtaagatctgcaagcggataattggcttcgctttgtgtcctttggtggaaacgggaatatcttctgataaaaactagacagaaatattctcagaatctccctttgtgatgtgggcattcaactaacacagttgaacatttcttttcacagagcagttttgaaacactcttttggtagaatctgccagtggatatttggagcgcttggagggctattgtgccaatggaaatatctgcccctgaaaactagacagaagcattctcagaaactgcttcgggatgtttgcattcaactcacagagttgaacatacctctgcatagagcagttttgaaaacctctttttgtagaatctgcaagtggatattcggaccactttgaggccttcataggaaacagtaatatcttcacataaaaactagatagaagcattgtcagaaagttctttgtgatgtgtgaattcaactcacagagttgaaccttcctttaatagagcagttttgaaacactctttttctagaatctgccagtagatatttggagcgctttgaggccttcgttggaaacaggaatatcttcacataaaaagtagatagaggcattctcagaaacttttttgtgatatgtagattcaactcacagcgttgaacctttctttggatggagcagttttgaaaaactcttttatcgaatctgcagttagacatttggggtgctttgagggctgtggtgcaaaaggaaatgtcttcccatagaaactagactgaagcattctcagcaacttcttggtgacgtttgcattcatctcacagtgttgaacatacctttccatagagtggttttgaatcactgtttttgtagaatcggcaagtggatatttggactgctttgaggccttcatcggaaacgggaatatcttcacataaacactagagagaagcattctcagaaacttctttgtcatctgtccattcaactcacagagttgaaccttcctttttctggagcagttttgaaacactctttttggagaatctgcaagtggatatttggagcgctttgaggcctatggtagaaaaagaaatatctgcccctaaacaccagacagaagcattccgagaaacttctctgtgatgtttgccttcaactagcagagttgaaccttccttttgatagggcagtttggaaacactctttttgtagaatctgcatgtggatatatggagcggtttgaggcctacggtcaaaaaggaaatatcttcctgggataaatagacgaaagcattctcagaaactgctttgtgatatgtgcattcgactcaccgagttgaaaattttttttgatagagcagttttgaaacactctgtagaatctgaaagtggatatttggagctctttgagggctacggcggcaaagaaactatattcacattaaagtagacagcagcattctcagaaacttctttaggatgtttgcagtaaactcacagagttgaacatacctttccgtagagcagttttgaaacactctgtttgtgggatccgcaagtggatatttggaccgctttgacacctttgctggaaatgggaatatcttcacatataaactagacagaagcattctcagaaacttcttcgtgatgtgtgcattctactcccaaatttgaatcttccttttcatgaagcagttttgaaacactctgtttgtgcattctacaattggatgattggaacgctttgatgtccatggtagaaaaggaaatatcctcatataaaaactagacagaaggattcacagaaaatgctttgtgatgtgtgcattcaaatcacggagttgaatctttcttttgtcagagcagttttgaaacactgtttctgtggaatctaccagcggacacttggagcgctttgagggctatggtggagaaggaaatatcttcacataaaaactagaaagaagcattctcggaaacatttatgtgaagcgtgccttcaactcacagagttgaaccttccttttgatagaacagttttgaaacactcttttgaacaattgcaggtgaatctttggagcgctttgaagcctttgttggaaatgggaatatcttcacacacaaactagccagaagaattctcagaaacttctttgtgatgtgtgcgttgaacccagagagatgaacctttcctttgatagagcagttttgaaacgtgtttttgtaagatcggcaagcggataattggcttcgctttgtgtcctttggtggaaacgggaatatcttctaataaaaactagacagaaatattctcagaatctcctttgtgatgtgggcattcaactaacacagttgaacatttcttttcacagagcagttttgaaacactcttttggtagaatctgcatgtggatatttggagcgcttggaggactattgtgccaatggaaatatctgcccctgaaaactagacagaagcattctcagaaactgcttcgtgatgtttgcattcaactcacagacttgaacatacctctgcatagagcagttttgaaaacctctttttgtagaatctgcaagtggatattcggaccactctgaggccttcataggaaacagtaatatcttcacataaaaactagatagaagcattgtcagaaagttctttgtgatgtgtgaattcaactcacagagttgaaccttcctttaatagagcagttttgaaacactctttttctagaatctgctagtagatatttggagtgcttggaggccttctttggaaaccggaatatcttcacaggaaatgtagatagaggcattctcagaaacttttttgtgatatgtagtttcaactcacagcgttgaacctttcttttgatagagcagttttgaaaaactcttttatcgaatctgccagtagacctttggagtgctttgagggctgtggtgcaaaaggaaatgtcttcccatagaaactagactgaagcattctcagcaacttcttggtgacgtttgcattcatctcacagtgttgaacatacctttccatagagtagttttgaaacactgtttttgtagaatcggtaagtgaatatttggactgctttgaggccttcatcggaaacgggaatatcttcacataaacactagagagaagcattgtcggaaacttctttgtgatctgtccgttcaactcacagagttgaaccttcctttttatggagcagttttgaaacactgtttgtggagaatctgcaagtggatatttggagcgccttgaggccaatggtagaaaaagaaatatctgcctctaaatactagactgaagcattctgagaaacttctttgtgatggttgcatgcaactacaagagttgaaccttccttttgatagggcagtttggaaacactctttttgtagaatctgcatgtggatatctggagcgatttgaggcctatggtcaaaaaggaaatattttcctgggaaaaatagacgaaagcattctcagaaagtgctttgtgatatgtgcattcgactcaccgagttgaaacttttttttgatagagaagttttgaaacactctgtagaatctgaaagtggatatttggagctctttgagggctatggcggaaaagaaaatatattcacattaaaaaagtagacagcagcattctcagaaacttctttaggatgtctgcagtaaactcacagagttgaacatacctttccgtagagcagttttgaaacactctgtttgtgggatccacaagtggatatttggacagctttgagatctttgctggaaatgggaatatcttcacatataaactagacagaaggattcacagaaaatgctttgtgatgtgtgcattcaaatcacggagttgaatctttcttttattagagcagttttgaaacactctatttgtgcaatctacaattggataattggaaccctttgatgcccatggtagaaaatgaaatatcctcatataaaaactagacggaaggattcacagaaaatgctttgtgatgtgtgcattcagatcacggagttgaatctttcttttgttagagctgttttgaaacactgtttctgtggaatctgccagcggacacttggagcgctttgagggctatggtggagaaggaaatatcttcacataaaaactagaaagaagcattctcagaaacatttatgtgaagcgtgcattcaactcacagagttgaaccttccttttgatacaacagttttgaaacactcttttgaacaattgcaggtgtatctttggagcgctttgaagcctttgttggaaatgggaatatcttcacacacaaactagccagaagcattctcagaaacttctttgtgatgtgtgcgttgaacccagagagatgaacctttcctttgatagagcagttttgaaacgtgtttttgtaagatcggcaagcggataattggcttcgctttgtgtcctttggtggaaactggcatgtcttctaataaaaactagacagaaatattctcagaatctcctttgtgatgtgggcattcaactaacacagttgaacattacttttcacagagcagttttgaaacactcttttggtagaatctgccagtggatatttggagcgcttggagggctattgtgccaatggaaatatctgcccctgaaaactagacagaagcattctcagaaactgcttcgtgatgtctgcattcaacacacagagttgaacatacctcttcacagagcagttttgaaaacctctttctgtagaatctgcaagtggatattcggaccactttgaggccttcataggaaacagtaatatcttcacataaaaactagatagaagcattgtcagaaagttctttgtgatgtgggaattcaacacacagagttgaaccttcctttaatagagcagtttgaaacactctttttctagaatctgccagtagatatttggagcgctttgaggccttcgttggaaaccggaatatcttcacataaaacgtagatagaggcattctcagaaacttttttgtgatatgtagattcaactcacagcgttgaacctttctttggatggagcagttttgaaaaacacttttatcgaatctgcaggtagacatttggggtgctttgagggctgtggtgcaaaaggaaatgtcttcccatagaaactagactgaagcattctcagcaacttctttgtgacgtttgcattcatctcacagtgttaaacatacctttccatagagtagttttgaagcactatttttgtagaatctgcaagtggatatttggaatgctttgaggccttcatcggaaacgggaatatcttcacataaacactagacagaagcattctcagaaacttctttgtgatctgtccattcaactcacagagttgaaccttcctttttatggagcagttttgaatcactgtttttgtagaatctgcaagtggatatttcgagcgctttgaggcctatggtagaaaaagaaatatctgcctctaaaaaccagacagaagcattctgagaaacttctttgtgatgtttgcattcaactaccagagttgaaccttccttttgatagggcagtttggaaacagtctttttgtagaatctgcatgtggatatctggagcgatttgaggcctacggtccaaaaggaaatatcttcctgggaaaaatagacgaaagcattctcagtaaactgctttgtgatatgtgcattcgactcaccgagttgaaacttttttttgatagagcagttttgaaacactctgtagaatctgaaagtggatatttggagctctttgagggctatggcggcaaagaaactatattcacattaaagtagacagcagcattctcagaaacttctttaggatgtttgcagtaatctcacagagttgaacctacctttccgtagagcagttttgaaacactctgtttgtgggatccgcaagtggatatttggaccgctatgagacctttgctggaaatgggaatatcttcacatataaactagacagaagcattctcagaaacttcttggtgatgtgtgcattgcactcccaattttgaatcttccttctcatggagcagttttgaaacactctgtttgtgcaatctacaattggataattggaacgcttggatgcccatggtagaaaaggaaatatcctcatataaaaactagacagaaggattcacagaaaatgctttgtgatgtgtgcattcaaatcacggagttgaatctttcttttgttagagcagttttgaaacactgtttctgtggaatctgccagcggacactaggagcgctttgagggctacggtggagaaggaaatatcttcacacaaaaactaaaaagaagcattctcagaaacatttatgtgaagcgtgcattcaactcacagagttgaaccttccttttgatacaacagttttgaaacactcttttgaacaattgcaggtgaatctttggagcgctttgaagcctttgttggaaatgggaatatcttcacacaaactagccagatgcattctcagaaacttctttgtgatgtgtgcgttgaacccagagagatgaacctttcctttgatagagcagttttgaaacgtgtttttgtaagatcggcaagcggataattggcttcgctttgtgtcctttggtggaaacgggaatatcttctaataaaatctagacagagatattctcagaaacttctttgtgatgtgggcattcaactgacacagttgaacatttcttttcacagagcagttttgaaacactcttttggtcgaatctgccagtggatatttggagcgctttgagggctattgtgccaatggaaatatctgcccctaaaaactagacagaagcattctcagaaactgctttgtgatgtttgcattcaactcacagaggtgaacatacctcttcatagagcagttttgaaaacctctttttgtagaatctataagtggatattcggaccactttgaggtcttcataggaaacagtaatatcttcacataaaaactagagagaagtattgtcagaaagttctttgtgatgtgtgaattcaactcacagagttgaaccttcctttaatagagcagttttgaaacactctttttctagaatctgcaagtagatatttggagcgctttgaggccttcgttggaaactggaatatcttcacataaaaagtagatagaggcattctcagaaacttttttgtgatatgtagattcaactcacagcattgaacctttctttggatggagcagttttgaaaaactcttttatcgaatctgcaggtagacatttggggtgctttgagggctgtggtgcaaaaggaaatgtcttcccatagaaactagactgaagcattctcagcaacttcttggtgacgtttgcattcatctcacagtgttgaacatacctttccatagagtggttttgaaacactgtttttgtagaatcgacaagtggatatttggactgctttgaggccttcatcggaaacgggaatatgttcacataaacactagagagaagcattctcagaaacttctttgtgatctgtccattcaactcacagagttgaaccttcctttttatggagcagttttgaaacactgtttgtgaagaatctgcaagtggatatttggagcgccttgaggccaatggtagaaaaagaaatatctgcctctaaatactagactgaagcattctgagaaacttctttgtgatgtttgcattcaactaccagagttgaaccttccttttgatagggcagtttggaaacactcattttgtagcatctgcatgtggatatctggagcgatttgaggcctacggtcaaaaaggaaatatcttcctgggaaaaatagacgaaagcattctcagaaactgctttgtgatatgtgcattcgaatcaccgagttcaaacttttttttcatagagcagttttgaaacactctgtagaatctgaaagtggctatttggaactctttgagggctatggcggaaaagaaaatatattcacattaaattagacagcagcattctcagaaacttctttaggatgtctgcagtaaactcacagagttgaacatacctttccgtagagcagttttgaaacactctgtgggatccacaagtggatatttggacagctttgagatctttgctggaaatgggaatatcttcacatataaactagacagaagcattctcagaaacttcttcgtgatgtgtgcattgtactcccaaatttgaatcttccttctcatggagcagttttgaaacactctgtttgtgcaatctacacttggataattggaacgcttggatgcccatggtagaaaaggaaatatcgtcatataaaaactagacagaaggattcacagaaaatgctttgtgatgtgtgcattcaaatcacggagttgaatctttcttttgtcagagcagttttgaaacactgtttctgtggaatctgccagcggacactttgagcgctttgagggctatggtagagaaggaaatatcttcccataaaaactagaaagaagcattctcagaaccatttatgtgaagcgtgcgttctactcacagagttgaaccttccttttgatagaacagttttgaaacactcttttgaacaattgcaggtgaatatttggagggctttgaagcctttgttggaaatgggaatatcttcacacacaaactagccagaagcattctcagaaaattctttgtgatgcgtgcgttgaacccagagagatgaacctttcctttgatagagcagttttgaaacgtgtttttgtaagatctgcaagcggataattggcttcgctttgtgtcctttggtgggaacgggaatatcttctaataaaaactagacagaaatattctcagaatctcctttgtgatgtgggcattcaactaacacagttgaacatttcttatcacagagcagttttgaaacactcttttggtagaatctgccagtggatatttggagcgcttggagggctattgtgccaatggaaatatctgcccctgaaaactagacagaagcattctcagaaactgcttcgggatgtttgcattcaactcacagagttgaacatacctctgcatagagcagttttgaaaacctctttttgtagaatctgcaagtggatattcggaccactttgaggccttcatgggaaacagtaatatcttcacataaaaactacatagaagcattgtccggaagttctttgtgatgtgtgaattcaactcacagagttgaaacttcctttaatagagcagtgttgaaacactctttttctagaatctgcaagtagatatttggagcgcttggaggccttcgttgtaaaccggaatatcttcacaggaaatgtagatagaggcatgctcagaaacttttatgtcatatgtagattcaactcacagcgttgaacctttcttttgatagagcagttttgaaaaactcttttatcgaatctgcaagtagacatttggagtgctttgagggctctggtgcaaaaggaaatgtcttcccatagaaactagactgaagcattctcagcaacttcttggtgacgtttgcattcacctcacagtgttgaacatacctttccatagagtggttttgaaacacagtttttgtagaatcggcaagtggatatttggactgctttgaggccttcatcggaaacgggaatatcttcacataaacactagagagaagcattctcagaaacttccttgtggtctgtccattcaactcacagagttgaaccttcctttttatggagcagttttgaaacactgttttcggaggatctgcaagtggatatttggagcgctttgaggcctatggtagtaaaagaaatatctgcctatgacaactagacagaagcattccgagaaacttctctgtgatgtttgcattcaactagcagagttgaaccttccttttgatagggcagtttggagacactctttttgtagaatctgcatgtggatatctggagcggtttgaggcctacggtcaaaaaggaaatatcttcctgggaaaaatagacgaaagcattctcagaaactgctttgtgatatgtgcattcgactcaccgagttgaaacttttttttgatagagcagttttgaaacactctgtagaatctgaaagtggatatttggagctctttgagggctatggcggcaaagaaactatattcacattaaagtagacagcagcattctcagaaacttctttaggatgtttgcagtaaactcacagagttgaacctacctttccgtagagcagttttgaaacactctgtttgtgggatccacaagtggatatttggaccgctttgagacctttgctggaaatgggaatatcttcacatataaactagacagaagcattctcagaaacttcttcgtgatgtgtgcattctactcccaaatttgaatcttccttttcatgaagcagttttgaaacactctatttgtgcaatctacaatgggataattggaacgctttgatgcccatggtagaaaaggaaatatcctcatataaaaactagacagaaggattcacagaaaatgctttgtgatgtgtgcattcaaatcacggagttgaatctttcttttgttagatcagttttgaaacactgtttctgtggaatctgccagcggacacttggagcgctttgagggctatggtggagaaggaaatatcttcacataaaaactagaaagaagcattctcagaaccgtttatgtgaagcgtgcattcaactcacagagttgaaccttccttttgatagaacagttttgaaacactcttttgaacaattgcaggtgaatatttggagggctttgaagcctttgttggaaatgggaatatcttcacacacaaactagccagaagcattctcagaaacttctttgtgatgtgtgcgttgaacccagagagatgaacctttcctttgatagagcagttttgaaacgtgtttttgtaagatctgcaagcggatagttggcttagctttgtgtcctttggtggaaacgggaatattttctaataaaaactagacagaaatattctcagaatcttctttgtgatgtgggcattcaactaacacagttgaacctttcttttcacagagcagttttgaaacactcttttgctagaatctgccagtggatatttagagcgctttgagggctattgtgccaacggaaatatctgcccctaaaaactagacagaagcattctcagaaactactttgtgatgtttgcattcaactcacagagttgaacatacctcttcatagagcagttttgaaaacctctttttgtagaatctgcaagtggatattcggaccactttgaggccttcataggaaacagtaataccttcacataaaaactagatagaagcattgtcagaaagttctttgtgatgtgtgaattcaactcacagagttgaaccttccattaatagagcagttttgaaacactctttttctagaatctgcaagtagatatttggagcgctttgaggccttcgttggaaaccggaatatcttcacataaaaagtagatagaggcattctcagtaaacttttttgtgatatgtagattcaactcacagcgttgaacctttctttggatggagcagttttgaaaaacccttttatcgaatctgcaggtagacatttggggtgctttgagggctgtggtgcaaaaggaaatgtcttcccatagaaactagactgaagcattctcagcaacttctttgtgacgtttgcattcatctcacagtgttgaacatacctttccatagagtagttttgaaacactgtttttgtagaatcggcaagtggatatttggactgctttgaggccttcatcggaaacgggaatatcttcacataaacactagagagaagcattctcagaaacttctttgtgatctgtccattcaactcacagagttgaaccttcctttttatggagcagctttgaaacactctttttggagaatctgcaagtggatattcggagcgctttgaggcctatggtagaaaaagaaacatctgcctctaaaaactagactgaagcattctgagaaacttctttgtgatgtttgctttcaactaccagagttgaaccttccttttgatagggcagtttggaaacactctttttgtagaatctgcatgtggatatctggagcgatttgaggcctacagtcaaaaaggaaatatcttcctgggaaaaatagacgaaagcattctcagaaactgctttgtgatatgtgcattcgactctccgagttgaaacttttttttgatagagcagttttgaaacactctgtagaatctgaaagtggatatttggagctcttcgagggctatggcggaaaagaaaatatattcacattaaactagacagcagcattctcagaaacttctttaggatgtttgcagtaaactcacagagttgaacctacctttccgtagagcagttttcaaacactctgtttgtgggatccgcaagtggatatttggaccgctttgagacctttgctggaaatgggaatatcttcacatataaactagacagaagcattctcagaatcttcttcgtgatgtgtgcattctactcccgaatttgaatcttccttttcatgaagcagttttgaaacactctgtttgtgcaatccacaattggataaatggaacgctttgatgcccatggtagaaaaggaaatatcctcatataaaaactagacagaagcattcacagaaaatgctttttgatgtgtgcattcaaatcacggagttgaatctttcttttgttagagcagttttgaaacactgtttctgtggaatctgccagcggacacttggagcgctttgagggctatggtggagaaggaaatatcttcacataaaaactagaaagatgcattctcagaaacatttatgtgaagcgtgcattcaactcacagagttgaaccttccttttgatagaacagttttgaaacactcttttgaacaattgcaggtcaatatttggagcgctttgaagcctttgctggaaatgggaatatcttcacgcacaaagtagccagaagcattctcagaaacttctttgtgatgtgtgcgttgaacccagagagatgaacctttcctttgatagagcagttttgaaacgtgtttttgtaagatcggcaagcggataattggcttcgctttgtgtcctttggtggaaacgggaatatcttctaacaaaaactagacagaaatattctcagaatcttctttgtgatgtgggcattcaactaacacagttgaacgtttcttttcacagagcagttttgaaacactcttttggtagaatctgccagtggatatttggagcgctatgagggctattgtgccaacggaaatatctgcccctaaaaactagacagaagcatcctcagaaactactttttgatgtttgcattcaactcacagagttgaacataccccttcatagagctgtttttaaaacctctttttgtagaatctgcaagtggatatttggaccactttgtgacctttcctggaaatggaaatatcttcacctaaaaactagacagaagcattgtcaggaagttctttgtgatgtgtgaattcaactcacagagttgaaccttcctttaatagagcagttttgaaacactctttttctagaatctgcaagtagatatttggagcgcttggaggccttctttggaaaccggaatatcttcacaggaaatgtagatagaggcattctcagaaactttttttgtgatatgtagattcaactcacagcgttgaacctttctttggatggagcagttttgaaaacctcttttatcgaatctgcaggtaaacatttggggtgctttgagggctgtggtgcaaaaggaaatgtcttcccatagaaactagactgaaacattctcagcaacttctttgtgacgtttgcattcatctcacagcattgaacatacctttccaaagagtagttttgaaacactatttttgtagaatctgcaagtggatatttggactgctttgaggccttcatcggaaacgggaatatcttcacataaacactagagagaagcattctcagaaacttctttgtgatctgtccattcaactcacagagttgaaccttccttttaatggagcagttttgaaacactgtttttggagaatcttcaagtagctatttggagcgctttgtggcctatggtagaaaaagaaatatctgcctataacaactagacagaagcattctgagaaacttctttgtgatgtttgcattcaactaccagaggtgaaccttccttttgatagggcagtttggaaacactctttttgtagaatctgcatgtggatatctggagcgatttgaggcctacggtccaaaaggaaatctcttcctgggaaaaatagacgaaagcattctcagaaactgctttgtgatatgtgcattcgactctccgagttgaaacttttttttgatagagcagttttgaaacactctgtagaatctgaaagtggatatttggagctctttgagggctatggcggaaaagaaaatatattcacattaaactagacagaagcattcccagaaacttctttaggatgtttgcagtaaactcacagagttgaacatacctttccgtagagcagttttgaaacactctgtttgtgggatccgcaagtggatatttggaccgctttgagacctttgctggaaacgggaatatcttcacatataaactggacagaagcattctcagaaacttcttcgtgatgtgtgcattctactcccaaatttgaatcttccttttcatgaagcagttttgaaacactctgtttgtgcaatccacaattggataattggaacgctttgatgcccatggtagaaaaggaaatatcttcatataaaaactagacacaaggattcacagaaaatgctttgtgatgtgtgcattcaaatcacggagttgaatctttcttttgtcagagcagttttgaaacactgtttctgtggaatctgccagcggacacttggagcgctttgagggctacggtggagaaggaaatatcttcccataaaaactagaaagaagcattctcagaaacatttatgtgaagcgtgcattccactcacagagttgaaccttccttttgatacaacagttttgaaacactcttttgaacaattgcaggtgaatctttggagcgctttgaagcctttgttggaaatgggaatatcttcacacacaaactagccagaagcattctcagaaacttctttgtgatgtgtgcgttgaacccagagagatgaacctttcctttgaaagagcagttttgaaacgtgtttttgtaagatctgcaagcggatagttggcttcgctttgtgtcctttgctggaaacgggaatatcttctaataaaaactagacagaaatattctcagaatcttctttgtgatgtgggcattcaactaacagagttgaacgtttcttttcacagagcagttttgaaacactcttttggtagaatctgtcagtggatatttggagcgctttgagggctattgtgccaacggaaatatctgcccctaaaaactagacagaagcattctcagaaactacttcgtgatgttcgcattcaactcacagagttgaacatacctcttcatagagcagatttgaaaacctctttctgtagaatctgcaagtggatattcggaccactttgaggccttcataggaaacagtaatatcttcacataaaaactagatagaagcattgtcagaaagttcttggtgatgtgtgaattcaactcacagagttgaaccttcctttaatagagcagttttgaaacactctttttctagaatctgcaagtagatatttggagcgctttgaggccttcgttggaaaccggaatatcttcacaggaaaagtagatagaggcattctcagaaacttttttgtgatatgtagattccactcacagcgttgaacctttctttggatggagcagttttgaaaaactcttttatcgaatctgcaggtagacatttggggtgctttgagggctgtggtgcaaaaggaaatgtcttcccatagaaactagactgaagcattctcagcaacttcttggtgacgtttgcattcatctcacagtgttgaacatacctttccatagagtggttttgaaacactgtttctgtagaatcggcaagtggatatttggactgctttgaggccttcatcggaaacgggaatatcttcacataaacactagagagaagcattctcagaaacttctttgtgatctgtccattcaactcacagagttgaaccttccttttcatggagcagttttgaaacactgtttgtggagaatctgcaagtggatatttggagcgccttgaggccaatggtagaaaaagaaatatctgcctctaaatactagactgaagcattccgagaaacttctctgtgatgtttgcattcaactagcagagttgaaccttccttttgatagggcagtttggaaacactctttttgtagaatctgcatgtggatatctggagcggtttgaggcctacggtcaaaaaggaaatatcttcctgggataaatagacgaaagcattctcagaaactgctttgtgatatgtgcattccactcaccgagttgaaactttttttgatagagcagttttgaaacactttgtagaatctcaaagtggatatttggagctctttgagggctatggcggaaaagaaaatatattcacattaaacttgacatcagcattctcagaaacttatttatgatgtttgcactaaactcacagagttgaacatacctttccgtagagcagttttgaaacactctgtttgtgggatccgcaagtggatatttggaccgctttgagacctttgctggaaatgggaatatcttcacatataaactagacagaagcattctcagaaacttcttcgtcacgtgtgcattctactcccagctttgaatcttccttctcatgaagcagttttgaaagactctatttgtgcaatctacaattggataattggaacgctttgatgcccatggtagagaaggaaatatcctcatataaaaactagacagaaggattcacagaaaatgctttgtgatgtgtgcattcaaatcacggagttgaatctttcttttgttagagcagttttgaaacactgtttctgtggaatctgccagcggacacttggagtgctttgagggctgtggtggagaaggaaatatcttcccataaaaactagaaagaggcattctcagaaacttttgtgtgatatgtagattcaactcacagcgttgaaccttccttttgatagaacagttttgaaacactcttttgaacaattgtaggtgaatatttcgagggctttgaagcctttgttggaaatgggaatatcttcacacacaaagtagccagaagcattctcagaaacttctttgtgaggtgtgcgttgaacccagagagaagaacctttcctttgatagagcagttttgaaacgtgtttttgtaagatcggcaagcggataattggcttcgctttgtgtcctttggtggaaacgggaatatcttctaataaaaactagacagaaatattctcagaatctcctttgtgatgtgggcattcaactaacacagttgaacatttcttttcacagagcagttttgaaacactcttttggtagaatctgccagtggatatttggagcgctttgagggctgttgtgccaatggaaatatctgcccctaaaatctagacagaagcattctcagaaactgcttcgtgatgtttgcattcaactcacagggttgaacatacctctgcatagagctgttttgaaaacctctttttgtagaatctgcaagtggatattcggaccactttgaggccttcataggaaacagtaatatcttcacataaaaactagatagaaatattctcagaatcttctttgtgatgtgggcattaaactcacagatttgaaccttcctttaatagagcagttttgaaacacactttttctagaatcggcaagtagatctttggagcgctttgaggccttcgttggaaaccggaatatcttcacaggaaaagtagatagaggcattctcagaaactttttcgtgatatgtggattcaactcacagcgttgaacctttcttttgatagagcagttttgtaaaactcttttatcgaatctgcaagtagacatttggagtgctttgagggctgtggtgcaaaaggaaatgtcttcccatagaaagtagactgaagcattctcagcaacttctttgtgacgtttgcattcatctcacagtgttgaacatacctttccatagagaagttttgaaacactaattttgtagaatctgcaagtggatatttggagtgctttgaggccttcatcggaaacgggaatatcttcacataaacactagacagaagcattctcagaaacttctttgtcatctgtccattcaactcacagagttgcaccttcctttttatggagcagttttgaaacactccttttggagaatctgcaagtggatatttggagcgctttgaggcctatggtagaaaaagaaatatctgcctctaaaaaccagacagaagcattccgagaaaagttctttgtgatgtttgcattcaactagcacagttgaaccttccttttgatagggcagtttggaaacactctttttgtagaatctgcatgtggatatctggagcggtttgaggcctacggtcaaaaaggaaatatcttcctgggaaaaatagacgaaagcattctcagaaactgctttgtgatatgtgcattcgactcaccgaattgcaactttttttggatagagcagttttgaaacactctgtagaatctgaaagtggatatttggagctctttgagggctatggcggaaaagaaaatatattcactttaaactagacagcagcattctcagaaacttctttaggatgtttgcagtaaactcacagagttgaacatacctttccgtagagcagttttgaaacactctgtttgtgggatccgcaagtggatatttggaccgctttgagacctttgctggaaatggcaatatcttcacgtataaactagacagaagcattctcagaaacttcttcgtgaagtgtgcagtctactccggaatttgaatcttccttttcatgaagcagttttgaaacactctgtttgtgcaatccacaattggataattggaacgctttgatgcccatggtagaaaaggaaatatactcatataaaaactagacagaaggattcacagaaaatgctttgtgatgtgtgcattcaaatcacagagttgaatctttcttttgttagagcagttttgaaacactgtttctgtggaatctgccagcggacacttggagcgctttgagggctacggtggagaaggaaatatcttcacataaaaactagaaagaagcattctcagaaacatttatgtgaagcgtgcattcaactcacagagttgaaccttccttttgatagaacagttttgaaacactcttttgaacaattgcaggtgaatctttggagcgctttgaagcctttgttggaaatgggaatatcttcacacacaaactagccagaagcattctcagaaacttctttgtgatgtgtgcgttgaacccagagagatgaacctttcctttgatagagcagttttgaaacgtgtttttgtaagatcggcaagcagataattggcttcgctttgtgtcctttggtggaaacgggaatatcttctaataaaaactagacagaaatattctcagaatctcctttgtgatgtgggcattcaactaacacagttgaacatttcttttcacagagcagttttgaaacactcttttggtagaatctgccagtggatatttggagcgcttggagggactactgtgccaatggaaatatctgcccctgaaaactagacagaagcattctcagaaactacttcgtgatgtttgcaatcaactcacagagttgaacatacctcttcacagagcagttttgaaaacctctttttgtagaatctgcaagtggatattcggagcactttgaggccttcataggaaacagtaatatcttcgcataaaaactagatagaagcattgtcaggaagttctttgtgatgtgtgaattcaactcacagagttgaaccttcctttaatagagcagttttgaaacactctttttctagaatctgcaagtagatatttggagcgcttggaggccttcgttggaaaccggaatatcttcacaggaaatgtagatagaggcattctcagaaactttttcgtgatatgtggattcacctcacagcgttgaacctttcttttgatagagcagttttggaaaactcttttatcgaatctgcaagtagacatttggagtgctttgagggctgtggtgcaaaaggaaatgtcttcccatagaaactagactgaagcattctcagcaacttcttggtgacgtttgcattcatctcacagttttgaacatacctttccatagagtggttttgaaacactgtttttgtataatcggcaagtggatatttggactgctttcaggccttcatcggaaacgggaatatcttcacataaacactagagagaagcattctcagaaacctctttgtggtctgtccattcaactcacagagttgaaccttcctttttatggagcagttttgaaaccctgtttttggagaatctgcaagtggatatttggagcgctttgaggcctatggtagaaaaagaaatatctgcctatgacaactagacagaagcattccgagaaaagttctttgtgatgtttgcattcaactaccagagttgaaccttccttttgatagggcagtttggaaacactctttttgtagaatctgcatgtggatatctggagcggtttgaggcctacggtcaaaaaggaaatatcttcctgggaaaaatagacaaaagcattctcagaaactgctttgtgatatgtgcattcgactcaccgagttgaaacttttttttgatagagcagatttgaaactctctgtagaatctgaaagtggatatttggagctctttgagggctatggcggaaaagaaaagatattcacattaaactagacagcagcattcccagaaacttctttaggatgtttgcagtaaactcacagagttgaacatacctttccgtagagcagctttgaaacactctctttgtgggatccgcaagtggatatttggactgctttgagacctttgctggaaacgggaatatcttcacatataaactggacagaagcattctcagaaacttcttcgtgatgtgtgcattctactcccgaatttgaatcttccttttcatgaagcagttttgaaacactctgtttgtgcaatccacaattggataattggaacgctttgatgcccatggtagaaaaggaaatatcctcatataaaaactagacacaaggattcacagaaaatcctttgtgatgtgtgcattcaaatcacggagttgaatctttcttttgtgagagcagttttgaaacactgtttctgtggaatctgccagcggactcttggagctctttgagggctatggtggagaaggaaatatcttcccataaaaactagaaagaagcattctcagaaacatttatgtgaagcgtgcattcaactcacagagttgaaccttcgttttgatacaacagttttgaaacactcttttgaacaattgcaggtgaatctttggagcgctttgaagcctttgttggaaatgggaatatcttcacacacaaactagccagaagcattctcagaaacttctttgtgatgtgtgcgttgaacccagagagatgaacctttccttggatagagcagttttgaaacgtgtttttgtaagatctgcaagcggataattggcttcgctttgtgtcctttggtggaaacgggaatatcttctaataaaaactagacggaaatattctcagaatctcctttgtgatgtgggcattcaactaacacagttgaacatttcttttcacagagcagttttgaaacactcttttgggagaatctgccagtggatatttggagcgcttggagggctattgtgccaatggaaatatctgcccctggaaactagacagaagcattctcagaaactacattgtgatgtttgcattcgaatcacagagttgaacatacctcttcatagagcagttttgaaaaccttttttgtagaatctgaaagtggatattcggaccactttgaggccttcataggaaacattaatatcttcacataaaaactagatagaagcattgtcagaaagttctttgggatgtgtgaattcaactcacagagttgaaccttcctttaatagagcagttttgaaacactctttttctagaatctgcaagtagatatttggagcgctttcaggccttctttggaaaccggaatatcttcacataaaaagtagatagaggcattctcagaaactttttcgtgatatgtggattcaactcacagcgttgaacctttcttttgatagagcagttttgtaaaactcttttatcgaatctgcaagtagacatttggactgctttgagggctgtggtgcaaaaggaaatgtcttcccatagaaactagactgaagcattctcagcaacttcttggtgacgtttgcattcatctcacagtgttgaacatacctttccatagagtagttttgaaacactgtttgtgtagaatcggtaagtggatatttggactgctttgaggccttcatcggaaacgggaatatcttcacataaacactagagagaagcattctcagaaacttctttgtgatctgtccattcaactcacagagttgaaccttcctttttatggagcagttttgaaacactgtttttggaggatctgcaagtggatatttggagcaatttgaggcctatggtagaaaaagaaatatctgcctctaaaaactagacagaagcattccgagaaactcctctgtgatgtttgcattgaactagcagagttgaaccttccttttgatagggcagtttggaaacactctttttgtagaatctgcatgtggatatctggagcggtttgaggcctacggtcaaaaaggaaatatcttcctgggaaaaatagacgaaagcattctcagaaactgctttgtgatatgtgcattcgactcaccgatttgaaacttttttttgatagagcagttttgaaacactctgtagaatctgaaagtggatatttggagctctttgagggctatggcggaaaagaaaatatattcacattaaactagacagcagcattctcagaaacttctttaggatgtttacagtaaactcacagagttgaacatacctttccgtagagcagttttgaaacactctgtttgtgggatccgcaagtggatatttggaccgctttgagacctttgctggaaatgggaatatcttcacatataaactagacagaagcattctcagaaacttcttcgtgatgtgtgcattctactcccgaatttgaatcttcctttttatgaagcagttttgaaacactctgtttgtgcaatccacaattggataattggaacgctttgatgcccatggtagaaaaggaaatatcctcatataaaaactagacagaaggattcacagaaaatgctttgtgatgtgtgcattcaaatcacggagttgaatctttcttttgttagagcagttttgaaacactgtttctgtggaatctgccagcggacacttggagcgctttgagggctacggtggagaaggaaatatcttcacataaaaaatagaaagaagcattctcagaaacatttatgtgaagcgtacattcaactcacagagttgaaccttccttgtgatacaacagttttgaaacactcttttgaacaattgcaggtgaatctttggagcgctttgaagcctttgttggaaatgggaatatcttcacacacaaactagccagaagcattctcagaaacttctttgtgatgtgtgcgttgaacccagagagatgaacctttccttggatagagcagttttaaaacgtgtttttgtaagatctgcaagcggataattggcttcgctttgtgtcctttggtgggaacgggaatatcttctaataaaaactagacagaaatattctcagaatctcctttgtgatgtgggcattcaactaacacagttgaacatttcttttcacagagcagttttgaaacactcttttggtcgaatctgccagtggatatttggagcgctttgagggctgttgtgccaatggaaatatctgcccctaaaatctagacagaagcattctcagaaactgcttcgtgatgtttgcattcaactcacagacttgaacatacctctgcatagagcagttttgaaaacctctttttgtagaatctgcaagtggatattcggaccactctgaggccttcatgggaaacagtaaaatcttcacataaaaactagatagaagcattgtcagaaagttctttgtgatgtgtgaattcaactcacagagttgaaccttcctttaatagagcagttttgaaacactctttttctagaatctgcaagtagatatttggagcgctttgaggccttcgttggaaaccggaatatcttcacataaaacgtagatagaggcattctcagaaacttttttgtgatatgtagattcaactcacagcattgaacctttctttggatggagcagttttgaaaaacccttttatcgaatctgcaggtagacattcggggtgctttgagggctgtggtgcaaaaggaaatgtcttcccatagaaactagactgaagcattctcagcaacttctttgtgacgtttgcattcatctcacagtgttgaacatacctttccatagagtagttttgaaacactatctttgtagaatctgcaagtggatatttggactgctttgaggccttcatcggaaacgggaatatcttcacataaacactagagagaagcattctcagaaacttctttgtcatctgtccattcaactcacagagttgaaccttcctttttatggagcagttttgaaacactccttttggagaatctgcaagtggatatttggagcgctttgaggcctattgtagagaaagaaatatctgcctctaaaaaccagacagaagcattccgagaaacttctttgtgatgtttgcattcaactagcagagttgaaccttccttttgatagggaagtttggaaacactctttttgtagaatctgcatgtggatatctggagcggtttgaggcctacggtcaaaaaggaaatatcttcctgggaaaaatagacgaaagcattctcagaaagtgctgtgtgatatgtgcattcgactcaccgagttgaaacttttttttgatagagcagttttgaaacactctgtagaatctgaaagtggatatttggagctctttgagggctatggcggaaaagaaaatatattcacattaaagtagacagcagcattctcagaaacttctttaggatgtttgcagtaaactcacagagttgaacatacctttccgtagagcagttttgaaacactctgtttgtgggttccgcacgtggatatttggaccgctttgagacctttgctggaaatgggaatatcttcacatataaactagacagaagcattctcagaaacttcttcgtgatgtgtgcattctcctcccgatttcgaatcttccttttcatgaagcagttttgaaacactctgtttgtgcaatccacaattggataattggaacgctttgatgcccatggtagaaaaggaaatatcctcatataaaaactagacagaaggattcacagaaaatgctttgtgatgtgtgcattcaaatcacagagttgaatctttcttttgtcagagcagttttgaaacactgtttctgtggaatctgccagcggacacttggagcgctttgagggctgtggtggagaaggaaatatcttcccataaaaactagaaagaagcattctcagaaacatttatgtgaagcgtgcattcaactcacagagttgaaccttccttttgatagaagagttttgaaacactcttttgaacaattgcaggtgaatctttggagcgctttgaagcctttgttggaaatgggaatatcttcacacacaaactagccagaagcattctcagaaacttctttgtgatgtgtgcgttgaacccagagagatgaacctttcctttgatagagcagttttgaaacgtgtttttgtaagatcggcaagcggataactggcttcgctttgtgtcctttggtggaaacgggaatatcttctaataaaaactagacagaaatattctcacaatcatctttgtaatgtgggcattcaactaacacagttgaacatttcttttcacagagcagttttgaaacactcttttgctagaatctgccagtggatacttggagcgctttgagggctattgtgccaatggagatatcttcccctaaaaactagacagaagcattctcagaaactgctttgggatgtttgcattcaactgacagagttgaacatacctcttcatagagcagttttgaaaacctctttttgtagaatctgcaagtggatattcggaccactttgaggccttcataggaaacagtaatatcatcacataaaaactagatagaaggattgtcagaaagttctttgtgatgtgtgaattcaactcacagagttgaaccttcctttaatagagcagttttgaaacagtctttttctagaatctgccagtagatatttggagcgctttgaggccttcgttggaaaccggaatatcttcacataaaaagtagatagaggcattctcagaaacttttttgtgatatgtagattcaactcacagcgttgaacctttctttggatggagcagttttgaaaaactcttttatcgaatctgcaggtagacattcggggtgctttgagggctgtggtgcaaaaggaaatgtcttcccatagaaactagactgaatcattctcagcaacttcttggtgacgtttgcattcatctcacagtgttgaacatacctttgcatagagtagtttcaaaacactatttttgtagaatctgcaagtggacatttggactgctttgaggccttcatcggaaacgggaatatcttcacataaacactagacagaagcattctcagaaacttctttgtgatctgcccattcaactcacagagttgaaccttcctttttatggagcagttttgaaacactgtttttggagaatctgcaagtggatatttggagcgctttgaggcctatggtaggaaaagaaatatctgcctctaaaaactagacagaagcattccgagaaacttctttgtgatgtttgcattcaactagcagagttgaaccttccttttgatagggcagtttggaaacactctttttgtagaatctccatgtggatatctggagcggtttgaggcctacggtcaaaaaggaaatatcttcctgggaaaaatagacgaaagcattctcagaaactgctttgtgatatgtgcattcgactcaccgatttgaaactttttttggatagagcagttttgaaacactctgtagaatctgaaagtggatatttggagctctttgagggctatggcggaaaagaaaatatattcacattaaactagacagcagcattctcagaaacttctttaggatgtttgcagtaaactcacagagttgaacatacctttccgtagagcagttttgaaaccctctgtttgtgggatccgcaaggggatatttggaccgctttgagacctttgctggaaatgggaatatcttcacatataaactagacagaagcattctcagaaacttcttcgtgatgtgtgcattctactcccgaatttgaatcttccttttcatgaagcagttttgaaacaatctgtttgtgcaatccacaattggataattggaacgctttgatgcccatggtagaaaaggaaatatcctcatataaaaactagacagaaggattcacagaaaatgctttgtgttgtgtgcattcaaatcacggagttgaatctttcttttgtcagagcagttttgaaacactgtttctgtggaatctgccagcggacacttggagcgctttgagggctgtggtggagaaggaaatatcttcccataaaaactagaaagaagcattctcagaaacatgtatgtgaagcgtgaattcaactcacagtgttgaaccttccttttgatagaacagttttgaaacactcttttgaacaattgcaggtgaatctttggagcgctttgaagcctttgttggaaatgggaatatcttcacacacaaactagccagaagcattctcagaaacttctttgtgatgcgtgcgttgaacccagagagatgaacctttcctttgatagagcagttttgaaacgtgtttttgtaaggtctgcaagcggataatcgacttcgctttgtgtcctttggtggaaacgggaatatcttctaataaaaactagacagaaatattctcagaatctcctttgtgatgtgggcattcaactaacacagttgaacatttcttttcacagagcagttttgaaacactcttttggtagaatctgccagtggatatttggagcacttggagggctattgtgccaatggaaatatctgcccctgaaaactagacagaagcattctcagaaactacttcatgatgtttgcattcaactcagagagttgaacatacctcttcacagagcagttttgaaaacctctttttgtagaatctgcaagtggatattcggagcactttgaggccttcataggaaacagtaatatcttcgcataaaaactagatagaagcattgtcagaaagttctttgtgatgtgtgaattcaactcacagagttgaaccttcctttaatagagcagtttcgaaacactctttttctagaatctgcaagtagatatttggagcgctttgaggccttcgatgaaaaccggaatatcttcacaggaaaagtagatagaggcattctcagaaactttttcgtgatatgtggattcaactcacagcgttgaacctttcttttgatagagcagtgttgtaaaactcttttatcgaatctgcaagtagacatttggagtgctttgggggctgtggtgcaaaaggaaatgtcttcccatagaaactagactgaagctttctcagcaacttcttggtgacgtttgcattcatctcacagtgttgaacatacctttccatagagtggttttgaaacactgtttttgtagaatcggcaagtggatatttggactgctttgaggccttcatcggaaacgggaatatcttcacataaacactagagagaagcattctcagaaacttctttgtgatctgtccattcaactcacagagttgaaccttcctttttatggagcagttttgaaacactgtttgtggagaatctgcaagtggatatttggagcgccttgaggccaatggtagaaaaagaaatatctgcctctaaatactagactgaagcattctgagaaacttctttgtgatgtttgcattcaactaccagagttgaaccttccttttgatagggcagtttggaaacactcatttgtagaatctgcatgtggatatctggagcgatttgaggcctacggtcaaaaaggaaatatcttcctgggaaaaatagacgaaagcattctcagaaactgctttgtgatatgtgcattccactctccgagttgaaacttttttttgatagagcagttttgaaacactctgtagaatctgaaagtggatatttggagctctttgagggctatggcggaaaagaaaatatattcacattaaagtagacagcagcattctcagagacttctttaggatgtttgcagtaaactcacagagttgaacatacctttccgtaaagcagttttgaaaccctctgtttgtgggatctgcaagtggatatttggaccgctctgagacctttgctggaaatgggaatatcttcacatataaactagacagaagcattctcagaaacttcttcgtgatgtgtgcattctactcccaaatttgaatcttccttctcatgaagcagttttgaaacactctatttgtgcaatctacaattggataattggaaccctttgatgcccatggtagaaaaggaaatatcctcatataaaaactagacagaaggattcacagaaaatgctttgtgatgtgtgcattcaaatcacggagttgaatctttcttttgttagagcagttttgaaacactgtttctgtggaatctgccagcggacacttggagcgctttgagggctacggtggagaaggaaatatcttcacataaaaactagaaagaagcattctcagaaccatttatgtgaagcgtgcattcaactcacagagttgaaccttccttttgatagaacagttttgaaacactcttttgaacaattgcaggtgaatatttggagggctttgaagcctttgttggaaacgggaatatcttcacacaccaactagccagaagcattctcagaaacttgtttgtgatgtgtgcgttgaacccagagagatgaacctttccttcgatagagcagttttgaaacgtgtttttgtaagatcggcaagcggataattggcttcgctttgtgtcctttggtggaaacgggaatatcttataataaaaactagacagaaatattctcagaatcttctttgtgatgtgggcattcaactaacacagttgaacgtttcttttcacagagcagttttgaaacactcttttggtagaatctgtcagtggatatttggagcgctttgagggctattgtgccaacggaaatatctgcccctaaaaactagacagaagcattctcagaaactgcttcgtgatgtttgcattcaactcacagacttgaacatacctctgcatagagcagttttgaaaacctctttttgtagaatctgcaagtggatattcggaccacattgaggccttcataggaaacagtaatatcttcacataaaaactagatagaagcattgtcagaaagttctttgtgatgtgtgaattcaactcacagagttgaaccttcctttaatagagcagttttgaaacactctttttctagaatctgcaagtagatatttggagcgctttgaggccttcgttggaaaccggaatatcttcacataaaaagtaggtagaggcattctcagaaacttttttgtgacatgtagattcaactcacagcgttgaacctttcttttgatagagcagttttgaaaaactcttttatcgaatctgcaagtagacatttggagtgctttgagggctgtggtgcaaaaggaaatgtcttcccatagaaactagactgaagcattctcagcaacttctttgtgacgtttgcattcatctcacagtgttgaacatacctttccatagagtagttttgaagcactatttttgtagaatctgcaagtggatatttggactgctttgaggccttcatcggaaacgggaataccttcacataaacactagacagaagcattctcagaaacttctttgtggtctgtccattcaactcacagagttgaaccttcctttttatggagcagttttgaaacactgtttttggaggatctgcaagtggatatttggagcgctttgaggcccatggtagaaaaagaaatatctgcctatgacaactagacagaagcattccgagaaacttccttgcgatgtttgcattcaactagcagagtagaaccttccttttgatagggcagtttggaaacactctttttgtagaatctgcatgtggatatctggagcggtttgaggcctacggtcaaaaaggaaatatcttcctgggaaaaatagacgaaagcattctcagaaactgctttgtgatatgcgcattcgactcacctagttgaaacttttttttgatagagcagttttgaaacactctgtagaatctgaaagtggatatttggagctctttgagggctatggcggaaaagaaaatatattcacattaaagtagacagcagcattcccagaaacttctttaggatgcttgcagtaaactcacagagttgaacatacctttccgtagagcagttttgaaacactctgtttgtgggatccgcaagtggatatttggaccgctttgagacctttgctggaaacgggaatatcttcacatataaactagacagaagcattctcagaaacttcttcgtgatgtgtgcattctactcccaaatttgaatcttccttttcatgaagcagttttgaaacactctatttatgcaatctacaattggataattggaacgctttgatgcccgtggtagaaaaggaaatatcctcatataaaaactagacagaaggattcacagaaaatgctttgtgatgtgtgcattcaaatcacggagttgaatctttcttttcttagagcagttttgaaacactgtttctgtggaatctgccagcggacacttggagcccttggaacgctatggtggagaaggaaatatcttcacataaaaactagaaagaagcattctcagaaacatttatgtgaagcgtgcattcaactcacagagttgaacatttcgtttgatagaacagttttgaaacactcttttgaacaattgcaggtgaatctttggagcgctttgaagcctttgttggaaataggaatatattcacacacaaactagccagaaacattctcagaaacttctttgtaatgtgtgcgttgaacccagagagatgaacctttcctttgatagagctgttttgaaacgtgtttttctaacatctgcaagcggataattggcttcgcgttgcgtcctttggtggaaacgggaatatcttctaataaaaactagacagaaatattctcagaatcttctttgtgatgtgggcattcaactaacacagttgaacatttcttttcacagagcagttttgaaagactcttttggtagaatctgccagtggatatttggagcgctttgagggctattgtgccaatggaaatatcttcccctaaaaactagacagaagcattctcagaaactgcttcgtgatgtttgcattcaactcacagggttgaacatacctctgcatagagcagttttgaaaacctctttttgaagaatctgcaagtggatattcggaccactttgaggccttcataggaaacagtaatatcttcacataaaaactagatagagtaagcattgtcagaaagttctttgtgatgtgtgaattcaactcacagagttgaaccttcctttaatagagcagttttgaaacactcttcttctagaatctgcaagtagatatttggagcgctttgaggccttcgttggaaaccggaatatcttcacagaaaaagtagatagaggcattctcagaaactttttttgtgatatgtagattcaactcacagcgttgaacctttctttggatggagcagttttgaaaacctcttttatcgaatctgcaggtagacattcggggtgctttgagggctgtggtgcaaaaggaaatgtcttcccatagaaactagactgaagcattctcagcaacttcttggtgacgtttgcattcacctcacagtgttgaacatacctttccatagagtggttttgaaacactgtttttgtagaatcggcaagtggatatttggactgctttgaggccttcatcggaaacgggaatatcttcacataaacactagagagaagcattctaagaaacttctttgtgatctgtccattcaactcacagagttgaaccttcctttttatggagcagttttgaatcactgtttttggagaatctgcaagtggatatttggagcgatttgaggcctatggtagaaaaagaaatatctgcctctaaaatccagacagaagcattctgagaaacttctctgtgatgtttgcattcaactaccagaggtgaaccttccctttgatagggcagtttggaaacactcatttggagaatctgcatgtggatatctggagcgatttgaggcctacggtccaaaaggaaatatcttcctgggaaaaatagacgaaagcattctcaggaactgctttgtgatatgtgcattcgactctccgagttgaaactttttttggatagagcagctttgaaacactctgtagaatctgaaagtggatatttggagctctttgagggctatggcagaaaagaaaagatattcacattaaactagacagcagcattcccagaaacttctttaggatgtttgcagtaaactcacagagttgaacatacctttccgtagagcagctttgaaacactctgtgtgtgggatccgcaagtggatatttggaccgctttgagacctttgctggaaacgggaatatcttcacagataaactggacagaagcattctcagaaacttcttcgtgatgtgtgcattctactcccaaatttgaatcttccttttcatgaagcagttttgaaacactccgtttgtgtaatctacaattggataactggaacgctttgatgcccattgtagaaaaggaaataacctcatataaaaactagacagaaggattcacagaaaatgctttgtgatttgtgcattcaaatcacggagttgaatctttcttttgttagagcagttttgaaacactgtttctgtggaatctgccagcggacacttggagcgctttgagggctatggtggagaaggaaatatcttcacataaaaactagaaagaggcattctcagaaacttttgtgtgatatgtagattcaactcacagcgttgaaccttccttttgatagaacagttttgaaacactcttttgaacaattgcaggtgaatatttggagcgctttgaagcctttgttggaaatgggaatatcttcacacacaaagtagccagaagcattctcagaaacttctttgtgatgtgtgcgttgaacccagagagatgaacctttcctttgatagagcagttttgaaacgtgtttttgtaagatcggcaagcggataattggcttcgctttgtgtcctttcgtggaaacgggaatatcttctaataaaaactagacagaaatattctcagaatctcctttgtgatgtgggcattcaactaacacagttgaacatttcttttcacagagcagttttgaaacactcttttggtagaatctgccagtggatatttggagcgcttggagggctgttgtgccaatggaaatatctgcccctgaaaactagacagaagcattctcagaaactgctttgtgatgtttgcattcaactcacagagttgaacataccttttcatagagcagttttgaaaacctctttttgtagaatctgcaagaggatattcggaccactttgaggccttcataggaaacagtaatatcttcacataaaaactagatggaagcattgtcaggaagttctttgtgatgtgtgaattcaactcacagagttgaactttcctttaatagagcagtgttgaaacactctttttctagaatctgcaagtagatatttggagcgcttggaggccttcgttgtaaaccggaatatcttcagaggaaatgtagatagaggcattctcagaaactttttcgtgatatgtggattcaactcacagcgttgaacctttcttttgatagagcagttttgtaaaactcttttatcgaatctgcaagtagacatttggagtgctttggaggctgtggtgcaaaaggaaatgtcttcccatagaaactagactgaagcattctcagcaacttccttgtgacgtttgcattcatctcacagtgttgaacatacctttccatagagcagttttgaaacactatttttgtagaatctgcaagtggatatttggactgctttgaggccttcatcggaaacgggaatatcttcacataaacactagacagaagcattctcagaaacttctttgtggtctgtccattcaactcacagagttgaaccttcctttttatggagcagttttgaaacactgtttttggaggatctgcaagtggatatttggagcgctttgaggcctatggtagaaaaagaaatatcggcctatgacaactagacagaagcattctgagaaacttctttgtgatgtttgcattcaactaccagagttgaaccttccttttaatagggcagtttggaaacactctttttgtagaatctgcatgtggatatctggagcgatttgaggcctacggtccaaaaggaaatatcttcctgggaaaaatagacgaaagcattctcagaaactgctttgtgatatgtgcattcgactgaccgagttgaaacttttttttgatagagcagttttgaaacactctgtagaatctgaaagtggatatttggagctctttgagggctatggcggcaaagaaactatattcacattaaagtagacagcagcattctcagaaacttctttaggatgtctgcagtaaactcacagagttgaacatacctttccgtagagcagttttgaaacactctgtttgtggggtccgcaagtggatatttggacagctttgagatctttgctggaaatgggaatatcttcacatataaactagacagaagcattctcagaaacttcttcgtgatgtgtgcattctactcccgaatttgaatcttccttttcatgaagcagttttgaaacactctgtttgtgcaatccacaattggataattggaacactttgatgccaatggtagaaaaggaaatagcctcatataaaaactagacagaaggattcacagaaaatgctttgtgatgtgtgcattcaaatcacggagttgaatctttcttttgtcagagtagttttgaaacactgtttctgtgggatctgccagcggacacttggagcgctttgagggctgtggtggagaaggaaatatcttcccataaaaactagaaagaagcattctgagaaccatttatgtgaagcgtgcgttcaactcacagagttgaaccttccttttgatagaacagttttgaaacactcttttgaacaattgcaggtgaatatttggagggctttgaagcctttgttggaaatgggaatatcttcacacacaaactagccagaagcattctcagaaacttctttgtgatgtgtgcgttgaacccagagagatgaacctttcctttgatagagcagttttgaaacgtgtttttgtaagatctgcaagcggataattggcttcgctttgtgtcgcttggtggaaacgggaatatcttctaataaaaactagacagaaatattctcagaatcttctttgtgatgtgggcattcaactaacacagttgaaactttctcttcacagagcagttttgatacactcttttggtagaatctgccagtggatatttggagcgctttgaggactattgtgccaacggaaatatctgcccctaaaaactagacagaagcattctcagaaattactttgtgatgtttgcattcaactcacagatttgaaaatacctcctcatagagcagttttgaaaacatctttttgtagaatctgcaagtggatattcggaccactttgaggccttcataggaaacagtaatatcttcacagaaaaactagatagaagcattgtcagaaagttctttgtaatgtgtgaattcaactcacagagatgaaccttcctttaatagagcaattttgaaacactctttttccagagtctgcaagtagatatttggagcgctttgaggccttcgttggaaaccggaataccttcacataaaaagtagatagaggcattctcagaaacttttttgtgatatgtagattcatctgacagcgttgaacctttcttttgatagagcagttttgaaaaactcttttgtcgaatctgcaagtagacatttggagtgctttgagggctgtggtgccaaaggaaatgtcttcccatggaaactagactgaagcattctcagcaacttctttgtgacgtttgcattcatctcacagtgttgaacatatctttccatagagtagttttgaaacactgtttttgtagaatcggcaagtggatatttggactgctttgaggccttcatcggaaacgggaatatcttcacataaacactagagagaagcattctcagaaacttctttgtcatctgtccattcaactcacagagttgaaacttcctttttatggagcagttttgaaacactccttttggagaatctgcaagtggatatttggagcgctttgaggcctacggtagaaaaagaaatatctgcctctaaaaaccagacagaagcattccgagaaacttctttgtgatgtttgcattcaactagcagagttgaatccttccttttgcatagggcagtttggaaactctctttttgtagaatctgcatgtggatatctggagcggtttgaggcctacggtcaaaaaggaaatatcttcctgggaaaaatagacgaaagcattctcagaaactgctttgtgatatgtgcattcgactcaccgagttgaaacttttttttgatagagcagttttgaaacactctgtagaatctgaaagtggatatttggagctctttgagggctatggcggaaaagaaactatattcacattaaagtagacagcagcattcccagaaacttctttaggatgtttgcagtaaactcacagacttgaacatacctttccgtagagcagttttgaaacactctgtttgtgggatccgcaagtggatatttggacccctttgagacctttgctggaaacgggaatatcttcacatataaactagacagaagcattctcagaaatttcttggtgatgtgtgcattgtactcccaaatttgaatcttccttctcatggagcagttttcaaacactctgtttgtgcaatctacaattggagaattggaacgctcggaggcccgtggtagaaaaggaaatatcctcatataaaaactagacagaaggattcacagaaaatgctttgtgatgtgtgcattcaaatcacggggttgaatctttcttttgttagagcagttttgaaacactgtttctgtggaatctgccagcggacacttggagcgctttgagggccatggtggagaaggaaatatctttccataaaaactagaaagaagcattctcggaaacatttatgtgaagcatgcattcaactcacagagttgaaccttccttttgatagaacagttttgaaacactctttttaacaattgcaggtgaatctttggagcgctttgaaggctttgttggaaatgggaatatcttcacacacaaactagccagaagcattctcagaaacttctttgtgatgtgtgcgttgaacccagagagatgaacctttcctttgatagagcagtttggaaacgtgtttttgtaagatctgcaagctgataattggcttcgctttgtgtcctttggtggaaacgggaatatcttctaataaaaactagacagaaatattctcagaatcttctttgtgatgtgggcattcaactaacacagttgaacctttcttttcacagagcagtttggaaacacccttttggtagaatctgccagtggatatttggagcgctttcagggctattgtgccaacggaaatatctgcccctaaaaactagacagaagcattctcagaaactgcttcgtgatgtttgcattcaactcacagggttgaacatacctctgcatagagcagttttgaaaacctctttttgtagaatctgcaagtggatattcggaccactttgaggccttcataggaaacagtaatatcttcacataaaaactagatagaagcattgtcagaaagttctttgtgatgtgtgaattcaactcacagcgttgaaccttcctttattagagcagttttgaaacactctttttctagaatctgccagtagatatttggagcgctttgaggccttcgttggaaaccggaatatcttcacataaaacgtagatagaggcattctcagaatctctttgtgatatgtagattcaactcacagcgttgaacctttctttcgatggagcagttttgaaaaactcttttatcgaatctgcaggtagacatttggggtgctttgagggctgtggtgcaaaaggaaatgtcttcccatagaaactagactgaaagcattctcagcaacttctttgtgacgtttgcattcatctcacagtgttgaacatacctttccatagagtagttttgaaacactgtttttgtagaatcggccagtggatatttggactgctttgaggccttcatcggaaacgggaatatcttcacataaacactagagagaagcattctcagaaacttctttgtgatctgtccattcaactcacagagttgaaccttcctttttatggagcagttttgaaacactcctttgggagaatctgcaggtggatatttggagcgctttgaggcctatggtagaaaaagaaatatctgcctctaaaaaccagacagaagcattccgagaaacttctttgcgatgtttgcattcaactagcagagttgaactttccatttgatagggcagtttggaaacactctttttgtagaatctgcatgtggatatctggagcggtttgaggcctatggtcaaaaaggaaatatcttcctgggaaaaatagacgaaagcattctcagaaactgctttgtgatatgcgcattcaactcaccgagttgaaacttttttttgatagagcagttttgaaacactctgtagaatctgaaagtggatatttggagctctttgagggctatggcggaaaagaaaatatattcacattaaagtagacagcagcattctcagaaacttctttaggatgtttgcagtaaactcacagagttgaacctacctttccgtagagcagttttgaaacactctgtttgtgggatccgcaagtggatatttggaccgctttgagacctttgctggaaatgggaatatcttcacatataaactagacagaagcattctcagaaacttctttgtgatgtgtgcattgtactcccaaatttgaatcttccttctcatggagcagttttgaaacactctgtttgtgcaatctacaattggataattggaacgctttgatgcccatggtagaaaaggaaatatcctcatataaaaactagacagaaggattcacagaaaatgctttgtgatgtgtgcattcaaatcacggagttgaatctttcttttgtcagagcagttttgaaacactgtttctgtggaatctgccagcgaacacttggagcgctttgagggctatggtggagaaggaaatatcttcccataaaaactagaaagaagcattctcagaaccatttatgtgaagcgtgcgttcaactcacagagttgaaccttccttttgatagaacagttttgaaacactcttttgaacaattgcaggtgaatatttggggggctttgaagcctttgttggaaatgggaatatcttcacacacaaactagccagaagcattctcagaaacttctttgtgatgtgcgcgttgaacccagagagatgaacctttcctttgatagagcagttttgaaacgtgtttttgtaagatcggcaagcggataattggcttcgctttgtgtcctttggtggaaacgggaatatcttctaataaaaactagacagaaatattctcacaatcatctttgtgatgtgggcattcaactaacacagttgaacatttcttttcacagagcagtttggaaacactcttttgctagaatctgccagtggatacttggagcgctttgagggtattgtgccaatggaaatatcttcccctaaaaactagacagaagcattctcagaaactactttgtgatgtttgcattcaactcacagagttgaacatacctcttcatagagcagttttgaaaacctctttttgtagaatctgcaagtggatattcggaccactttgaggccttcataggaaacagtaatatcttcacataaaaactagatagaaatattctcagaatcttctttgtgatgtgggcattaaactcacagatttgaaccttcctttaatagagcagttttgaaacacactttttctagaatctgcaagtagatatttggagcgctttgaggccttcgttggaaaccggaatatcttcacaggaaaagtagatagaggcattctcagaaacttttttgtgatatgtagattcaactcacagcgttgaacctttctttggatggagcagttttgaaaaactcttttatcgaatctgcaggtagacatttggggtgctttgagggctctggtgcaaaaggaaaagtcttcccatagaaactagactgaagcattctcagcaacttcttgttgacgtttgcattcatctcacagtgttgaacatacctttccatagagtggttttgaaacactgtttttgtagaatcggcaagtggatatttggactgctttgaggccttcatcggaaacgggaatatcttccataaacactagagagaagcattctcagaaacttctttgtggtctgtccattcaactcacagagttgaaccttcctttttatggagcagttttgcaacactgttttcggagaatctgcaagtggatatttggagcgctttgaggcctatggtagaaaaagaaatatctgcctatgacaactagacagaagcattctgagaaacttctttgtgatgtttgcattcaactaccagaggtgaaccttccttttgatagggcagtttggaaacactctttttgtagaatctgcatgtggatatctggagcgatttgaggcctacggtccaaaaggaaatatcttcctgggaaaaatagacgaaagcattctcagaaactgctttgtgatatgtgcattcgactctccgagttgaaactttttttggatagagcagttttgaaacactctgtagaatctgaaagtggatatttagagctctttgagggctatggcggaaaagaaaagatattcacattaaactagacagcagcattctcagaaacttctttaggatgtttgcagtaaactcacagagttgaacatacctttccgtagagcagttttgaaacactctgtttgtgggatctgcaagtggatatttggaccgctttgagacctttgctggaaatgggaatatcttcacgtataaactagacagaagcattctcagaaacttcttcgtgatgtgtgcattgttctcccaaatttgaatcttccttctcatggagcagttttgaaacactctgtttgtgcaatctacaattggagaattggaacgcttgcatgcccgtggtagaaaaggaaatatcctcatataaaaactagacagaaggattcacagaaaatgctttgtgatgtgtgcattcaaatcacggagttgaatctttcttttgttagagcagttttgaaacactgtttctgtggaatctgccagcggacacttggagcgctttgagggctgtggtggagaaggaaatatcttcccataaaaactagaaagaagcattctcagaaacatttatgtgaagcgtgcattcaactcacagagttgtaccttccttttgatacaacagttttgaaacactcttttgaacaattgcaggtgaatctttggagcgctttgaagcctttgttggaaatgggaatatcttcacacacaaactagccagaagcattctcagaaacttctttgtgatgtgtgcgttgaacccagagagatgaacctttcctttgatagagcagttttgaaacgtgtttttgtaagatcggcaagcggataattggcttcgctttgtgtcctttggtggaaacgggaatatcctctaataaaaactagacagagatattctcagaaacttctttgtgatgtgggcattcaactaacacagtcgaacatttcttttcacagagcagttttgaaacactcttttggtcgaatctgccagtggatatttggagcgctttgagggctattatgccaatggaaatatctgcccctaaaaactagacagaagcattctcagaaactgttttgtgatgtttgcattcaactcacagaggtgaacatacctcttcatagagcagttttgaaaacctctttttgtagaatctgcaagtggatattcggaccactttgaggccttcataggaaacagtaatatcttcacataaaaactagatagaagcattgtcagaaagttctttgtgatgtgtgaattcaactcacagagttgaaccttcctttaatagagcagttttgaaacactctttttctagaatctgcaagtagatatttggagcgctttgaagccttcgttggaaaccggaatatcttcacataaaaagtagatagagacatgctcagaaacttttatgtcatatgtagattcaactcacagcgttgaacctttcttttgatagagcagttttgaaaaactcttttatcgaatctgcaagtagacatttggagtgctttgagggctctggtgcaaaaggaaatgtcttcccatagaaactagactgaagcattctcagcaacttctttgtgacgtttgcattcatctcacagtgttgaacatacctttccatagagtacttttgaaacactgtttttgtagaatctgcaagtggatatttggactgctttgaggccttcatcggaaacgggaatatcttcacataaacactagagagaagcattctcagaaacttctttgtcatctgtccattcaactcacagagttgaaccttcctttttatggagcagttttgaaacactccttttggagaatctgcaagtggatatttggagcgctttgaggcctatggtagaaaaagaaatatctgcctctaaaaaccagacagaagcattccgagaaacttctttgtgatgtttgcattcaactagcagagttgaaccttccttttgatagggcagtttgggaacactctttttgtagaatctgcatgtggatatctggagcggtttgaggcctacggtcaaaaaggaaatatcttcctgagaaaaatagacgaaagcattctcagaaactgctttgtgatatgtgcattcgactcaccgagttgaaactttttttggatagagcagttttgaaacactctttagaatctgaaagtggatatttggagctccttgagggctatggcggaaaagaaaatatattcacattaaactagacagcagcattctcagaaacttctttaggatgtttgcagtaaactcacagagttgaacctacctttccatagagcagttttgaaacactctgtttgtgggatatgcaagtggatatttggacagctttgagaactttgctggaaatgggaatatcttcacatataaactagacagaagcattctcagaaacttcttcgtgatgtgtgcattctactcccgaatttgaatcttccttttcatgaagcagttttgaaacactctgtttgtgcaatccacaattggataattggaacgctttgatgcccatggtagaaaaggaaatatcctcatataaaaactagacagaaggattcacagaaaatgctttgtgatgtgtgcattcaaatcacggagttgaatctttcttttgttagagcagtattgaaacactgtttctgtggaatctgccagcggacacttggagcgctttgagggctacggtggagaaggaaatatcttcacataaaaactagaaagaagcattctcagaaacatgtatgtgaagcgtgaattcaactcacagtgttgaaccttccttttgatagaacagttttgaaacactcttttgaacaattgcaggtgaatctttggagcgctttgaagccagtgttggaaatgggaatatcttcacacacaaactagccagaagcattctcagaaacttctttgtgatgtgtgcgttgaacccagagagatgaacctttcctttgaaagagcagttttgaaacgtgtttttgtaagatctgcaagcggatggttggcttcgctttgtgtcctttggtggaaacgggaatatcttctaataaaaactagacagaaaatattctcagaatcttctttgtgatgtgggcattcaactaacacagttgaacatttcttttcacagagcagttttgaaacactcttttggtagaatctgccagtggatatttggagcgcttggagggctattgtgccaatggaaatatctgcccctgaaaactagacagaagcattctcagaaactacttcgtgatgtctgcattcaacacacagagttgaacatacctcttcacagagcagttttgaaaacctctttctgtagaatctgcaagtggatattcggaccactttgaggccttcataggaaacagtaatatcttcacataaaaactagatagaagcattgtcagaaagttctttgtgatgtgtgaattcaactcacagagttgaaccttcctttaatagagcagttttgaaacactcattttctagaatctgcaagtagatatttggagcgctttgaggccttcgttggaaaccggaatatcttcacaggaaatgtagatagaggcattctcagaaactttttcgtgatatgtggattcaactcacagcgttgaacctttcttttgatagagcagttttgtaaaactcttttatcgaatctgcaagtagacatttggagtgctttcagggctgtggtgcaaaaggaaatgtcttcccatagaaactagactgaagccttctcagcaacttcattgtgacgtttgcattcatctcacagtgttgaacatacctttccatagagtagttttgaagcactatttttgtagaatctgcaagtggatatttggactgctttgaggccttcatcggaaacgggaatatcttcacataaacactagacagaagcattctcagaaacttctttgtggtctgtccattcaactcacagagttgaaccttcctttttatggagcagttttgaaacactgtttttggaggatctgcaagtggatatttggagcgctttgaggcctatggtagaaaaagaaatatctgcctatgacaactagacagaagcattccgagaaacttctttgtgatgtttgcattcaactagcagagttgaaccttccttttgatggggcagtttggaaacactctttttgtagaatctgcatgtggatatctggagcggtttgaggcctacggtcaaaaaggaaatatcttcctgggaaaaatagacgaaagcattctcagaagctgctttgtgatatgtgcattcaactcaccgagttgaaactttttttggatagagcagttttgaaacactctgtagaatctgaaagtggatatttggagctctttgagggctatggcggaaaagaaaatatattcacattaaactagacagcagcattctcagagacttctttaggatgtttgcagtaaactcacagagttgaacatacctttccgtaaagcagttttgaaaccttctgtttgtgggatctgcaagtggatatttggaccgctttgagacctttgctggaaatgggaatatcttcacatataaactagacagaaacattctcagaaacttcttcgtgacgtgtgcattgtactcccaaatttgaatcttgcttctcatggagcagttttgaaacactctgtttgtgcaatctacaattggagaattggaaggcttggatgcccgtggtagaaaaggaaatatcctcatataaaaactagacagaaggattcacagaaaatgctttgtgatgtgtgcattcaaatcacggggttgaatctttctttagtcagagcagttttgaaacactgtttctgtggaatctgccagcggacacttggagcgctttcagggctatggtggagaaggaaatatcttcccataaaaactagaaagaagcattctcagaaacatttatgtgaagcgtgcattcaactcacagagttgaaccttccttttgatagaagagttttgaaacacccttttgaacaattgcaggtgaatctttggagcgctttgaagcctttgttggaaatgggaatatcttcacacacaaactagccagaagcattctcagaaacttctttgtgatgtgtgcgttgaacccagagagatgaacctttcctttgatagagcagttttgaaacgtgtttttgtaagatctgcaagcggataattggcttcgctttgtgtccttcggtggaaacgggaatatcttctaataaaaactagacagagatattctcagaaacttctttgtgatgtgggcattcaactaacacagtcgaacatttcttttcacagagcagttttgaaacactcttttggtcgaatctgccagtggatatttggagcgctttgagggctattgtgccaatggaaatatctgcccctaaaaactagacagaagcattctcagaaactacttcgtgatgtctgcattcaacacacagagttgaacatacctcttcagagagcagttttgaaaacctctttctgtagaatctgcaagtggatattcggaccactttgaggccttcataggaaacagtaatatcttcacataaaaactagatagaagcattgtcagaaagttcgttgtgatgtgtgaatttaactcacagagttgaagcttcctttaatagagcagttttgaaacactctttttctagagtctgcaagtagatatttggagcgctttgaggccttcgttggaaaccggaatatcttcacataaaaagtagatagaggcattctcagaaacttttttgtgatatgtagattcaactcacagcgttgaacctttcttttgatagagcagttttgaaaaacgcttttatcgaatctgccagtagaccttttgagtgctttgagggctgtggtgcaaaaggaaatgtcttcccatagaaactagactgaaagcattctcagcaacttcttggtgacgtttgcattcatctcacagtgttgaacatacctttccatagagtagttttgaaacactgtttttgtagaatcggcaagtggatatttggactgctttgaggccttcatcggaaacgggaatatcttcacataaacactagagagaagcatcctcagaaacttatttgtcatctgtccattcaactcacagatttgaaccttcctttttctgcagcagttttgaaacactctttttggagaatctgcaagtggatatttggagcgctttgaggcctatggtagaaaaagaaatatctgcctctaaaaaccagacagaagcattctgagaaacttctttgtgatgtttgccttcaactaccagagttgaaccttccttttgatagggcagtttggaaacactctttttgtagaatctgcatgtggatatctggagcgatttgaggcctacggtccaaaaggaaatgtcttcctgggaaagatagacgaaagcattctcagaaagtgctttgtgatatgcgcattcgactcaccgagttgaaacttttttttgatacagcagttttgaaacactctgtagaatctgaaagtggatatttggagctctttgagggctatggcggaaaagaaaatatattcacattaaagtagacagcagcattctcagaaacttctttaggatgtttgcagtaaactcgcagagttgaacatacctttccgtagagcagttttgaaacactctgtttgtgggatccgcaagtggatatttggaccgctttgagacctttgctggaaatgggaatatcttcacgtataaactagacagaagcattctcagaaacttcttcgtgatgtgtgcattctactcccgaatttgaatcttccttttcatgaagcagttttgaaacactctgtttgtgcaatccacaattggataattggaacgctttgatgtcccatggtagaaaaggaaatatcctcatataaaaactagacagaaagattcacagaaaatgctttgtgatgtgtgcattcaaatcacggagttgaatctttcttttgtcagagcagttttgaaacactgtttctgtggaatctgccagcggacacttggagcactttgagggctatggtggagaaggaaatatcttcccataaaaactagaaagaagcattctcagaaccatttatgtgaagcatgcattcaactcatagagttgaactttccttttgatagaacagttttgaaacactcttttgaacaattgcaggtgaatatttggagggctttgaagcctttgttggaaacgggaatatcttcacacacgaactagccagaagcattctcagaaacttctttgtgatgtgtgcgttgaacccagagagatgaacctttcctttgatagagcagttttgaaacgtgtttttgtaagatctgcaagcggataattggcttcgctttgtgtcctttggtggaaacgggaatatcttctaataaaaactagacagagcgatattctcagaaacttctttgtgatgtgggcattcaactaatgcagttgaacatttcttttcacagagcagttttgaaacactcttttggtcgaatctgccagtggatatttggagcgctttgagggctattgtgccaatggaaatatctgcccctaaaaactagacagaagaattctcagaaactgcttcgggatgtttgcattcaactcacagagttgaacatacctctgcatagagcagttttgaaaacctctttttgtagaatctgcaagtggatattcggaccactttgaggccttcatgggaaacagtaatatcttcacataaaaactagatagaagcattgtcagaaagttctttgtgatgtgtgaattcaactcacagagttgaaccttcctttaatagagcagttttgaaacactctttttctagaatctgccagtagatatttggagcgctttgaggccttcgttggaaaccggaatatcttcacataaaaagtagatagaggcattctcagaaacttttttgtgatatgtagattcagctcacagcgttgaacctttcttttgatagagcagttttgaaaaactcttttatcgaatctgccagtagacatttggagtgctttgagggctgtggtgcaaaaggaaatgtcttcccatggaaactagactgaatcattctcagcaacttcttggtgacgtttgcattcatctcacagtgttgaacatacctttgcatagagtagttttgaaacactatttttgtagaatctgcaagtggacatttggactgctttgaggccttcatcggaaacgggaatatcttcacataaacactagacagaagcattctcagaaacttctttgtggtctgtccattcaactcacagagttgaaccttcctttatatggagcagttttgaaaccctgtttttggagaatctgcaagtggatatttggagcgctttgaggcctatggtagaaaaagaaatatctgcctatcacagctagacagaagcattctgagaaagttctttgtgatgtttgcattcaactaccagggttgaaccttccttttgatagggcagtttggaaacactctttttgtagaatctgcatgtggatatctggagcgatttaaggcctaaggtccaaaaggaaatatcttcctgggaaaaatagacgaaagcattctcagaaagggctttgtgatatgcgcattcgactcaccgagttgaaacttttttttgatagagcagttttgaaacactctgtagaacctgaaagtggatatttggagctctttcagggctatggcggaaaagaaaatatattcacattaaagtagacagcagcattctcagaaacttctttaggatgtttgcagtaaactcacagagttgaacctacctttccgtagagcagttttgaaacactctgtttgtgggatccgcaagtggatatttgggaccgctttgagacctttgctggaaatgggaatatcttcacatataaactagacagaagcattctcagaaacttcttcgtgatgtgtgcattgtactcccaaatttgaatcttccttcttatggagcagttttgaaacactctgtttgtgcaatctacaattggagaattggaacgcttggatgcccgtggtagaaaaggaaatatcctcatataaaaactagacagaaggattcacagtaaaatgctttgtgatgtgtgcattcaaatcacggagttgaatctttcttttgtcagagcagttttgaaacactgtttctgtggaatctgccagcggacacttggagcgctttgagggctatggtggagaaggaaatatcttcccataaaaactagaaagaagcattctcagaaacatttatgtgaagcgtgcattcagctcacagagttgaaccttccttttgatagaacagttttgaaacactcttttgaacaattgcaggtgaatctttgagcgctttgaagcctttgttggaaatgggaatatcttcacacacaaactagccagaagcattctcagagacttctttgtgatgtgtgcgttgaacccagagagatgaacctttcctttgatagagcagttttgaaacgtgtttttgtaagatctgcaagcggatagttggcttcgctttgtgtcctttggtggaaacgggaatatcttctaataaaaactagacagaaatattctcacaatcgtctttgtgatgtgggcattcaactaacacagttgaacatttcttctcacagagcagttttgaaacactcttttgctagaatctgccagtggatacttggagcactttgagggctattgtgccaatggagatatcttcccctaaaaactagacagaagcattctcagaaactgcttcgggatgtttgcattcaactcacagagttgaacatacctctgcatagagcagttttgaaaacctctttttgtagaatctgcaagtggatattcggaccactttgaggccttcatgggaaacagtaatatcttcacataaaaactagatagaagcattgtcagaaagttctttgtgatgtgtgaattcaactcacagagttgaaccttccttcaatagagcagttgtgaaacactctttttctagaatctgcaagtagatacttggagcgctttgaggccttcgttggaaaccggaatatcttcacaggaaaagtagatagaggcattctcagaaacttttttgtgatatgtagattcaactcacagcgttgaacctttcttttgatagagtagttttgaaaaactcttttatcgaatctgcaagtagacatttggagtgctttgagggctgtggtgcaaaaggaaatgtcttcccatagaaactagactgaaatcattctcagcaacttcttggtgacgtttgcattcatctcacagtgttgaacatacctttgcatagagtagtttcgaaacactatttttgtagaatctgcaagtggacatttggactgctttgaggccttcatcggaaacgggaatatcttcacataaacactagacagaagcattctcagaaacttcttgtcatctgtccattcaactcacaaagttgaaccttcctttttatggagcagttttgaaacactccttttggagaatctgcaagtggatatttggagcgctttgaggcctatggtagaaaaagaaatatctgcctctaaaaaccagacagaagcattctgagaaacttctttgtgatgtttgcattcaactaccagagttgaaccttccttttgatagggcagtttggaaacactctttttgtagaatctgcatgtggatatctggagcgatttgaggcctgcggtcaaaaaggaaatatcttcctgggaaaaatagacgaaagcattctcagaaactgctttgtgatatgtgcattcgactcaccgagttgaaacttttttttggtagagcagttttgaaacactctgtagaatctgaaagtggatatttggagctctttgagggctatggcggaaaagaaaatatattcacattaaagtagacagcagcattcccagaaacttctttaggatgtttgctgtaaactcacagagttgaacatacctttccgtagagcagctttgaaacactctgtgtgtgggatccgcaagtggatatttggaccgctttgagacctttgctggaaacgggaatatcttcacatataaactggacagaagcattctcagaaacttcttcgtgatgtgtgcattctactcccaaatttgaatcttccttttcatgaagcagttttgaaacactctatttgtgcattctacaattggatgattggaacgctttgatgcccatggtagaaaaggaaatatcctcatataaaaactagacagaaagattcacagaaaatgctttgtgatgtgtgcattcaaatcacggagttgaatctttcttttgttagagcagttttgaaacactgtttctgtggaatctgccagcggacacttggagcgctttgagggctatggtggagaaggaaatatcttcacataaaaactagaaagaagcattctcagaaccatttatgtgaagcgtgcattcaactcacagagttgaaccttccttttgatagaacagttttgaaacactcttttgaacaattgcaggtgaatatttggagggctttgaagccttttttggaaatgggaatatcttcacacacaaactagccagaagcattctcagaaacttctttgtgatgtgtgcgttgaacccagaagagatgaacctttcctttgatagagcagttttgaaacgtgtttttgtaagatctgcaagcggatagttggcttcgctttgtgtcctttggtggaaacgggaatatcttctaataaaaactagacagagatattctcagaaatttctttgtgatgtgggcattcaactaacacagtcgaacatttcttttcacagagcagttttgaaacactcttttggtcgaatctgccagtggatatttggagcgctttgagggctattgtgccaatggaaatatctgcccctaaaaactagacagaagcattctcagaaactgctctgtgatgtttgcattcaactcacagagttgaacatacctcttcatagagcacttttggaaacctctttttgtagaatctgcaagtggatattcggaccactttgaggccttcataggaaacggtaatatcttcacataaaaactagatagaagcattgtcagaaagttctttgtgatgtgtggattcaactcacagagttgaaccttcctttaatagagcagttttgaaacactctttttgtagaatctgcaagtggatatttggagcgctttgaggccttcgttggaaaccggaatatcttcacaggaaaagtagatagaggcattctcagaaactctttgtgatatgtagattcaactcacagcgttgaacctttctttggatggagtagttttgaaaaactcttttatcgaatctgcaggtagacatttggggtgctttgagggctgtggtgcaaaaggaaatgtcttcccatagaaactagactgaagcattctcagcaacttcttggtgacgtttgcattcatctcacagtgttgaacatacctttccatagagtggttttgaaacactgtttttgtagaatcggctagtggatatttggacagctttcaggccttcatcggtaacgggaatatcttcacataaacactagagagaagaattctcagaaacttctttgtgatctgtccattcaactcacagagttgaaccttcctttttatggagcagttttgaaacactgtttgtggagaatctgcaggtggatatttggagcgccttgaggccaatggtagaaaaagaaatatctgcctctaaatactagactgaagcattctgagaaacttctttgtgatgtttgcattcaactaccagagttgaaccttccttttgatagggcagtttggaaacactctttttgtagaatctgcatgtggatatctggagcgatttgaggcctacggtccaaaaggaaatatcttcctgggaaaaatagacgaaagcatcctcagaaactgctttgtgatatgtgcattcgactcaccgagttgaaactttttttggatagagcagttttgaaacactctgtagaatctgaaagtggatatttggagctctttgagggctatggcggaaaagaaaatatattcacattaaacaagacagcagcattcccagaaacttctttaggatgtttgcagtaaactcacagagttgaacatacctttccgtagagcagttttgaaacactctgtttgtgggatccgcaagtggatatttggaccgctgtgagacctttgctggaaacgggaatatcttcacatataaactagacagaagcattctcagaaacttcttcgtgatgtgtgcattgtactcccaaatttgaatcttccttctcatggagcagttttgaaacactctgtttgtgcaatctacaattggataattggaacgcttggatgcccatggtagaaaaggaaatatcctcatataaaaactagatcagaaggactcacagaaaatgctttgtgatatgtgcattcagatcacggagttgaatctttcttttgttagagcagttttgaaacactgtttctgtggaatctgccagcggacacttggagcgctttgagggctatggtggagaaggaaatatcttcacataaaaactagaaagaagcattctcagaaccatttatgtgaagcgtgcgttcaactcacagagttgaaccttccttttgatagaacagttttgaaacactcttttgaacaattgcaggtgaatatttggagggctttgaagcctttgttggaaatgggaatatcttcacacacaaactagccagaaagcattctcagaaacttctttgtgatgtgtgcgttgaacccagagagatgaacctttcctttgatagagcagttttgaaacgtgtttttgtaagatctgcaagcggataattggcttcgctttgtgtcctttggtggaaacgggaatatcttctaataaaaactagacagaaatattctcagaatcttctttgtgatgtgggcattcagctaacacagttgaacgtttcttttcacagagcagttttgaaacactcttttggtagaatctgccagtggatatttggagcgctttgagggctattgtgccaatggaaatatctgcccctaaaaactagacagaagcattctcagaaattgctttgtgatgttggcattcaactcacagagttgaacatacctcttcatagagcagttttgaaaacctctttttgtagaatctgcaagtggatattcggaccactttgaggccttcataggaaacagtaatatcttcacataaaaactagatagaagcattgtcagaaagttctttgtgatgtgtgaattcaactcacagagttgaaccttcctttaatagagcagttttgaaacactctttttctagaatctgcaagtagatatttggagccctttgaggccttctttggaaactggaatatcttcacataaaaagtatatagaggcatgctcagaaacttttttgtcatatgtagattcaactcacagcgttgaacctttcttttgatagagcagttttgaaaaactcttttatcgattctgcaagtagacatttggagtgctttgagggctctggtgcaaaaggaaatgtcttcccatagaaactagactgaagcattctcagcaacttctttgtgacgtttgcattcatctcacagtgttgaacatacctttccatagagtagttttgaaacactgtttttgtagaatcggccagtggatatttggactgctttgaggccttcatcgggaacgggaatatcttcacataaacactagagagaagcattctcagaaacttctttgtcatctgtccattcaactcacagagttgaaccttcctttttatggagcagttttgaaacactccttttggagaatctgcaggtggatatttggagcgctttgaggcctatggtagaaaaagaaatatctgcctctaaaaaccagacagaagcattctgagaaaagttctttgtgatgtctgcattcaactagcagagttgaaccttccttttgatagggcagtttggaaacactctttttgtagaatctgcatgtggatatctggagcggtttgaggcctacggtcaaaaaggaaatatcttcctgggaaaaatagacgaaagcatcctcagaaactgctttgtgatatgtgcattcgactcactgagttgaaactttttttggatagagcagttttgaaacactctgtagaatctgaaagtggatatttggagctctttgagggctatggcggaaaagaaaatatattcacattaaactagacagcagcattctcagaaacttctttaggatgtttgcagtaaactcacagagttgaaacctacctttccgtagagcagttttgaaacactctgtttgtgggatccgcaagtagatatttggaccgctttgagacctttgctggaaatgggaatatcttcacatataaactagacagaagcattctcagaaacttcttcgtgatgtgtgcattctactcccaaatttgaatcttccttttcatgaagcagttttgaaacactctatttgtccaatctacaatgggataattggaacgctttgatgcccatggtagaaaaggaaatatcctcatataaaaactagacagaaggattcacagaaaatgctttgtgatgtgtgcattcaaatcacggagttgaatctttcttttgttagagcagttttgaaacactgtttctgtggaatctgccagcggacactaggagcgctttgagggctatggtggagaaggaaatatcttcacataaaaactagaaagaagcattctcagaaccatttatgttaagcgtgcattcaactcacagagttgaaccttccttttgatagaacagttttgaaacactcttttgaacaattgcaggtgaatatttggagggctttgaagcctttgttggaaatgggaatatcttcacacacaaactagccagaagcattctcagaaacttctttgtgatgtgtgcgttgaacccagggagatgaacctttcctttgatagagcagttttgaaacgtgtttttgtaagatctgcaagcggatagttggcttcggtttgtgtcctttggtggaaacgggaatatcttctaataaaaactagacagaaatattctcagaatcttctttgtgatgtgggcattcagctaacacagttgaacgtttcttttcacagagcagttttgaaacactcttttggtagaatctgccagtggatatttggagcgctttgagggctattgtgccaacggaaatatctgcccctaaaaactagacagaagcattctcagaaactgctttgggatgtttgcattcaactcacagagttgaacatacctcttcatagagcagttttgaaaacctctttttgtagaatctgcaagtggatattcggaccactttgaggccttcataggaaacagtaatatcatcacataaaaactagatagaagcattgtcagaaagttctttttgatgtgtgaattcaactcacagagttgaaccttccttcaatagagcagttgtgaaacactctttttctagaatctgcaagtagatacttggagcgctttgaggccttcgttggaaaccggaatatcttcacaggaaaagtagatagaggcatgctcagaaacttttttgtcatatgtagattcaactcacagcgttgaacctttcttttgatagagcagttttgaaaaactcttttatcgaatctgcaagtagacatttggagtgctttgacggctctggtgcaaaaggaaatgtcttcccatagaacctagactgaatcattctcagcaacttcttggtgacgtttgcattcatctcacagtgttgaacatacctttgcatagagtagtttcgaaacactatttttgtagaatctgcaagtggacattcggactgctttgaggccttcatcggaaacgggaatatcttcacataaacactagacagaagcattctcagaaacttctttgtggtctgtccattcaactcacagagttgaaccttcctttttatggagcagttttgaaacactgttttcggaggatctgcaagtggatatttggagcgctttgaggcctatggtagtaaaagaaatatctgcctatgacaactagacagaagcattccgagaaaagttctttgtgatgtttgcattcaactagcagagttgaaccttccttttgatagggcagtttggaaacactctttttgtagaatctgcatgtggatatctggagcggtttgaggcctacggtcaaaaaggaaatatcttcctgggaaaaatagacgaaagcattctcagcaaagggctttgtgatatgcgcattcgactcaccgagttgaaacttttttttgatagagcagttttgaaacactctgtagaacctgaaagtggatatttggagctctttcagggctatgacggaaaagaaaatatattcacattaaagtagacagcagcattctcagaaacttctttaggatgtttgcagtaaactcacagagttgaacctacctttccgtagagcagttttgaaacactctgtttgtgggatccgcaagtggatatttggaccgctttgagacctttgctggaaatgggaatatctgcacatttaaactagacagaagcattctcagaaacttcttcgtgatgtgtgcattctcctcccgaatttgaatcttcctttttatgaagcagttttgaaacactctgtttgtgcaatccacaattggataattggaacgctttgatgcccatggtagaaaaggaaatatcctcatataaaaactagacagaaggattcacagaaaatgctttgtgatgtgtgcattcaaatcacggagttgaatctttcttttgtcagagcagttttgaaacactgtttctgtggaatctgccagcggactcttggagctctttgagggctatggtggagaaggaaatatcttcccataaaaactagaaagaagcattctcagaaacatttatgtgaagcgtgcattcaactcacagagttgaaccttccttttgatacaacagttttgaaacactcttttgaacaattgcaggtgaatctttggagcgctttgaagcctttgttggaaatgggaatatcttcacacacaaactagccagaagtattcccagaaacttctttgtgatgtgtgcgttgaacccagagagatgaacctttcctttgatagagcagttttgaaacgtgtttttgtaagatctgcaagcggataattggctttgctttgtgtcccttggtggaaacgggaatatcttctaataaaaactagacagagatattctcagaaacttctttgtgatgtgggcattcaactaacacagtcgaacatttcttttcatgaagcagttttgaaacactcttttggacgaatctgccagtggatatttggagcgctttgagggctattgtgccaatggaaatatctgcccctaaaaactagacagaagcattctcagaaactgctttgggatgtctgcattcaactcacagagttgaacatacctcttcatagagcagtttcgaaaacctctttttgtagaatctgcaagtggatattcggaacactttgaggccttcataggaaacagtaatatcatcacataaaaactagatagaagcattgtcagaaagttctttgtgatgtgtgaattcaacacacagagttgaaccttcctttaatagagcagttttgaaacactctttttctagaatctgccagtagatatttggagcgctttgaggccttcgttggaaaccggaatatcttcacataaaacgtagatagaggcattctcagaaactttttcgtgatatgtggattcaactcacagcgttgaacctttcttttgatagagcagttttgtaaaactcttttatcgaatctgcaagtagacatttggagtgcgttgagggctgtggtgcaaaaggaaatgtcttcccatagaaagtagactgaagcattctcagcaacttcttggtgacgtttgcattcatctcacagtgttgaacatacctttacatagagtggttttgaaacactgtttttgtagaatcggcaagtggatatttggactgctttgaggccttcatcggaaacgggaatatcttcacttaaacactagagagagaagcattctcagaaacttctttgtggtctgtccattcaactcacagagttgaaccttcctttttatggagcagttttgaaacactgtttttggaggatctgcaagtggatatttggagcgctttgaggcctatggtagaaaaagaaatatctgcctatgacaactagacagaagcattctgagaaacttctttgtgatgtttgcattcaactaccagagttgaaccttccttttgatagggcagtttggaaacactctttttgtagaatctgcatgtggatatctggagcgatttgaggcctatggtcaaaaaggaaataacttcctgggaaaaatagacgaaagcattctcagaaactgctttgtgatatgtgcattcgactcaccgagttgaaacttttttttgatagagcagttttgaaacactctgtagaatctgaaagtggatatttggagctctttgagggctatggcagaaaagaaaatatattcacattaaagtagacagcagcatcctcagaaacttctttatgatgtttgcattaaactcacagagttgaacatacctttccatagagcagttttgaaacactctttttggggaatccgcaagtggatatttggaccgctttgagacctttgctggaaatgggaatatcttcacatataaactagacagaagcattctcagaaacttcttggtgatgtgtgcattgtactcccaaatttgaatcttccttctcatggagcagttttgaaacactctgtttgtgcaatctacaattggagaattggaacgcttggatgcccgtggtagaaaaggaaatatcctcatataaaaactagacagaaggattcacagaaaatgctttgtgatgtgtgcattcaaatcacggagttgaatctttcttttgtcagagcagttttgaaacactgtttctgtggaatctgccagcggacacttggagcgctttgagggctacggtggagaaggaaatatcttcacataaaaactagaaagaagcattctcagaaacatttctgtgaagcatgcattcaactcacagagttgaaccttccttttgttagaacagttttgaaaaactcttttgaacaattgcaggtgaatatttggagcgctttgaagcctttgctggaaatgggaatatcttcacgcacaaagtagccagaagcattctcagaaacttctttgtgatgtgtgcgttgaacccagagagatgaaccttttcctttgatagagcagttttgaaacgtgtttttgtaagatcggcaagtggataattggcttcgctttgtgtcctttgttggaaacgggaatatcttctaataaaaactagacagaaatattctcacaatcatctttgtgatgtgggcattcaactaacacagttgaacatttcttttcacagagccgttttgaaacactcttttgctagaatctgccagtggatacttggagcgctttgagggctattgtgccaatggagatatcttcccctaaaaactagacagaagcattctcagaaactacattgtgatgtttgcattcgactcacagagttgaacatacctcttcatagagcagttttgaaaaccttttttgtagaacctgaaagtggatattcggtcctctttgaagccttcataggaaacagtaatatcttcacataaaacctagctagaagcattgtcagaaagttctttgtgatgtgtgaattcaactcacagagttgaaccttcctttaatagagaagttttgaaacactctttttctagaatctgcaagtagatatttggagcgcttggaggccttcgttggaaaccggaatatcttcacaggaaatgtagatagaggcatgctcagaaacttttttgtcatatgtagattcaactcacagcgttgaacctttcttttgatagagcagttttgaaaaactcttttatcgaatctgcaagtagacatttggagtgctttgagggctctggtgcaaaaggaaatgtcttcccatagaaagtagactgaagcattctcagcaacttcttggtgacgtttgcattcatctcacagtgttgaacatacctttccctagagtggttttgaaacactgtttttgtagaatcggcaagtggatatttggactgctttgaggccttcatcggaaaagggaatatcttcacataaacactagagagaagcattctcagaaacttctttgtggtctgtccattcaactcacagagttgaaccttcctttttatggagcagttttgaaacactgttttcggagaatctgcaagtggatatttggagcgctttgaggcctatggtagaaaaagaaatatctgcctatgacaactagacagaagcattctgagaaacttctttgtgatgtttgcattgaactaccagaggtgaaccttccttttgatagggcagtttggaaacactctttttgtagaatctgcatgtggatatctggagcgatttgaggcctacggtccaaaaggaaatatcttcctgggaaaaatagacgaaagcattctcagaaactgctttgtgatatgtgcattcgactcaccgagttgaaactttttttggatagagcagttttgaaacactctgtagaatctgaaagtggatatttggagctctttgagggctatggcggaaaagaaaagatattcacattaaactagacagcagcattcccagtaaacttctttaggatgtttgcagtaaactcacagagttgaacatacctttccgtagagcagttttgaaacactctgtttgtgggatccgcaagtggatatttggaccgctttgagacctttgctggaaacgggaatatcttcacatataaactggacagaagcattctcagaaacttcctcgtgatgtgtgcattctactcccgaatttgaatcttccttttcatgaagcagttttgaaacactctgtttgtgcgatccacaattggataattggaacgctttgatgcccatggtagaaaaggaaatatcctcatatgaaaactagacagaaggattcacagaaaatgctttgtgatgtgtgcattcaaatcacggagttgaatctttcttttgttagagcagttttgaaacactctttctgtggaatctgccagcggacacttggagcgctttgagggctatggtggagaaggaaatatcttcacataaaaactagaaagaagcattctcagaaacatttatgtgaagcgtgcattcaactcacagcagttgaaccttccttttgatacaacagttttgaaacactcttttgaacaattgcaggtgaatctttggagcgctttgaagcctttgttggaaatgggaatatcttcacacacaaactagccagaagcattctcagaaacttctttgtgatgtgtgtgttgaacccagagagatgaacctttccttcgatagagcagttttgaaacgtgtttttgtaagatcggcaagcggataattggcttcgctttgtgtcctttggtggaaacgggaatatcttctaataaaaactagacagaaatattctcagaatcttctttgtgatgtgggcattcaacaaacacagttgaacgtttcttttcacagagcagttttgaaacactcttttggtagaatctgccagtggatatttggagcgctttgagggctattgtgccaatggaaataacttcccctaaaaactagacagaagcattctcagaaactgctttgtgatgtttgcattcaactcacagagttgaacctacctcttcatagagcagtttggaaaacctcttcttgtagaatctgcaagtggatattcggaccactttgaggctttcataggaaacagtaatatcttcacataaaaactagatagaagcattgtcagaaagttctttgtgatgtgtgaattcaactcacagagttgaaccttcctttaatagagcagttttgaaacactcttcttctagaatctgcaagtagatatttggagcgttttgaggccttcgttggaaaccggaatatcttcacagaaaaagtagatagaggcattctcagaaactttttcgtgatatgtggattcaactcaaagcgttgaacctttcttttgatagagcagttttgtaaaactcttttatcgaatctgcaagtagacatttggagtgctttgggggctgtggtgcaaaaggaaatgtcttcccatagaaactagactgaagcattctcagcaacttctttgtgacgtttgcattcatctcacagtgttgaacatacctttccatagagtagttttgaaacactgtttttgtagaatcgggaagtggatatttggactgctttgaggccttcatcggaaacgggaatatcttcacataaacactagagagaagcatcctcagaaacttctttgtcatctgtccattcaactcacagagttgaaccttcctttttctggagcagttttgaaacactctttttggagaatctgcaagtggatatttggagcgctttgaggcctatggtagaaaaataaatatctgcctctaaaaaccagacagaagcattccgagaaacttctttgtgatgtttgcattcaactagcagagttgaacctttcttttgatagggcagtttggaaacactctttttgtagaatctgcatgtggatatctggagcggtttgaggcctacggtcaaaaaggaaatatcttcctgggaaaaatagacgaaagcattctcagaaactgctttgtgatatgggcattcgactcaccgagttgaatcttttttttgatagagcagttttgaaacactctgtagaatctgaaagtggatatttggagctctttgagggctatggcggaaaagaaaatatattcacattaaactagagaggagcattctcagaaacttctttaggatgtttgcagtaaactcacagagttgaacatacctttccgtagagcagttttgaaacactctgtttgtgggatccgcaagtggatatttggaccgctttgagaactttgctggaaatggcaatatcttcacgtattaactagacagaagcattctcagaaacttcttcgtgatgtgtgcattctactcccgaatttgaatcttccttttcatgaagcagttttgaaacactctgtttgtgcaatccacaattggataattggaacgctttgatgcccatggtagaaaaggaaatatcctcatataaaaaccagacggaaggattcacagaaaatgctttgtgatgtgtgcattcaaatcgcggagttgaatctttcttttgttagagcagttttgaaacactgtttctgtggaatctgccagcggacacttggagcgctttgagggctatggtggagaaggaaatatcttcacataaaaactagaaagaagcattctcagaaacatttatgtgaagcgtgcattcaactcacagagttgaaccttccttttgatacaacagttttgaaacattcttttgaacaattgcaggtgaatctttggagcgctttgaagcctttgttggaaatgggaatatcttcacacacaaactagccagaagcattctcagaaacttctttgtgatgtgtgcgttgaacccagagagatgaacctttccttcgatagagcagttttgaaacgtgtttttgtaaggtcggcaagcggataaatggcttcgctttgtgtcctttggtggaaacgggaatatcttctaataaaaactagacagaaatattctcagaatctcctttgtgatgtgggcattcaactaacacagttgaacatttcttttcacagggcagttttgagacactcttttggtagaatctgccagtggatatttggagcgctttgagggctgttgtgccaatggaaatatctgcccctaaaatctagacagaagcattctctgaaactactttgtgatgtttgcattcaactcacagagttgaacatacctcttcatagagcagttttgaaaacctctttttgaagaatctgcaagtggatattcggaccactttgaggccttcataggaaacagtaatatcttcacataaaaactagatagaagcattgtcagaaagttctttgtgatgtgtgaattcaactcacagagttgaaacttcctttaatagagcagttttgaaacactctttttctagaatctgcaagtagatatttggagcgctttgaggccttctttggaaaccggaatatcttcacataaaaagtagatagaggtattctcagaaacttttttgtgatatgtagattcaactcacagcgttgaacctttcttttgatagagcagttttgaaaaactcttttatcgaatctgcatgtggacatttggagtgctttgagggctgtggtgcaaaaggaaatgtcttcacatagaaactagactgaagcattctcagcaacttctttgtgacgtttgcattcatctcacagtgttgaacatacctttccatagagtagttttgaaacactatttttgtagaatctgcaagtggatatttggactgctttgaggccttcatcggaaacgggaatatcttcacataaacactagacagaagcattctcagaaacttctttgtgatctgtccattcaactcacagagttgaaccttcctttttatggagcagttttgaaacactgtttttggagaatctgcaagtagatatttggagcgctttgtggcctatggtagaaaaagaaatatctgcctataacagctagacagaagcattccgagaaacttctctgtgatgtttgccttcaactagcagagttgaaccttccttttgatagggcagtttggaaacactctttttgtagaatctgcatgtggatatctggagcggtttgaggcctacggtcaaaaaggaaatatcttcctgggaaaaatagacgaaagcattctcagaaactgctttgtgatatgtgcattcgactgaccgagttgaaacttttttttgatagagcagttttgaaacactctgtagaatctgaaagtggatatttggagctctttgagggctatggcggaaaagaaactatattcacattaaagtagacagcagcattctcagcaaacatctttaggatgtttgcagtaaactcacagagttgaacatacctttccgtaaagcagttttgaaaccctctgtttgtgggatctgcaagtggatatttggaccgctttgagacctttgctggaaatgggaatatcttcacatataaactagacagaagcattctcagaaacttcttcgtgatgtgtgcattgtactcccaaatttgaatcttccttctcatggagcagttttgaaacactctgtttgtgcaatctacaattggagaattggaacgcttggatgcccgtggtagaaaaggaaatatcctcatacaaaaactagacagaaggattcacagaaaatgctttgtgatgtgtgcattcaaatcacggagttgaatctttcttttgttagagcagttttgaaacactgtttctgtggaatctgccaggggacacttggagcgctttgagggctatggtggagaaggaaatatcttcacataaaaactagaaagaaatattctcagaaatcttctttgtgatgtgggcattcaactaacacagttgaacatttcttttcacagaacagttttgaaacactcttttgaacaattgcaggtgaatctttggaacgctttgaagcctttgttggaaataggaatatattcacacacaaactagccagaagcattctcagaaacttctttgtgatgtgtgcgttgaacccagagagatgaacctttcctttgatagagcagttttgaaacgtgtttttgtaagatctgcaagcagataattggcttcgctttgtgtcctttggtggaaacgggaatatcttctaataaaaactagacagaaatattctcagaatctcctttgtgatgtgggcattcaactaacacagttgaacatttcttttcacagagcagttttgaaacactcttttggtagaatctgccagtggatatttggagcgcttggagggctattgtgccaatggaaatatctgcccctaaaaactagacagaagcattctcagaaactacttcgtgatgtttgcattcaacacacagagttgaacatacctcttcacagagcagttttgaaaacctctttctgtagaatctgcaagtggatattcggaccactttgaggccttcataggaaacagtaatatcttcacataaaaactagacagaagcattgtcagaaagttctttgtgatgtgtgaattcaactcacagagttgaaccttcctttaatagagcagttttgaaacactctttttctagaatctgcaagtagatatttggagcgctttgaggccttcgttggaaaccggaatatcttcacataaaaagtagatagaggcatgctcagcaaacttttttgtcatatgtagattcaactcacagcgttgaacctttcttttgatagagcagttttgaaaaactcttttatcgaatctgcaagtagacatttggagtgctttgagggctctggtgcaaaaggaaatgtcttcccatagaaactagactgaagcattctcagcaacttcttggtgacgtttgcattcatctcacagtgttgaacatacctttagatagagtggttttgaaacactgtttttgtagaatcggcaagtggatatttggactgctttgaggccttcatcggaaacgggaatatcttcacataaacactagagagaagcattctcagaaacttctttgtcatctgtccattcaactcacagagttgaaccttcctttttatggagcagttttgaatcactccttttggagtatctgcaggtggatatttggagcgctttgaggcctatggtagaaaaagaaatatctgcctctaaaaaccagacagaagcattctgaggaaacttctttgtgatgtttgcattcaactaccagagttgaaccttccttttgatagggcagtttggaaacagtctttttgtagaatctgcatgtggatatctggagcgatttgaggcctacggtccaaaaggaaatatcttcctgggaaaaatagacgaaagcatcctcagaaactgctttgtgatatgtgcattcgactcaccgagttgaaactttttttggatagagcagttttgaaacactctgtagaatctgaaagtggatatttggagctctttgagggctatggcggaaaagaaaatatattcacattaaactagacagcagcattcccagaaacttctttaggatgtttgcagtaaactcacagagttgaacatacctttccgtagagcagttttgaaacactctgtttgtgggatccgcaagtgaatatttggacccctttgagacccttgctggaaacgggaatatcttcacatataaactagacagaagcattctcagaaacttctttgtgatgtgtgcattctacacccaaatttgaatcttccttttcatgaagcagttttgaaacactctatttgtgcaatctacaattggataattggaaatctttgatgcccatggtagaaaaggaaatatcctcatataaaaactagacagaaggattcacagaaaatgctttgtgatgtgtgcattcaaatcacggagttgaatctttcttttgttagagcagttttgaaacactgtttctgtggaatctgccagcggacacttggagcgctttgaaggctatggtggagaaggaaatatcttcacataaaaactagaaagaagcattctcagaaacatttatgtgaagcgcgcattcaactcacagagttgaaccttccttttgatacaacagttttgaaacactcttttgaacaattgcaggtgaatctttggagcgctttgaagcctttgttggaaatgggaatatcttcacactcaaactagccagaagcattcccagaaacttctttgtgatgtgtgcgttgaacccagagagatgaacctttcctttcatagagcagttttgaaacgtgtttttgtaagatcggcaagcggataagtggcttcgctttgtgtcctttggtggaaacgggaatatcttctaataaaaactagacagaaatattctcagaatcttctttgtgatgtgggcattcaactaacacagttgaacatttcttttcacagagcagttttgaaacactcttttggtagaatctgccagtggatatttggagcgctttgagggctattgtgccaatggaaatatctgcccctaaaaactagacagaagcattctcagaaactgcttcgtgatgtttgcattcaactcacagacttgaacatacctctgcatagagcagttttgaaaacctctttttgtagaatctgcaagtggatattcggaccactttgaggccttcataggaaacagtaatatcttcacataaaaactagatagaagcattgtcagaaagttctttgtgatgtgtgaattcaactcacagagttgaaccttcctttaatagagcagttttgaaacactctttttctagaatctgcaagtcgatatttggagcgctttgaggccttctttggaaaccggaatatcttcacataaaaagtagatagaggcattctcagaaacttttttgtgatatgtagattcaactcacagcgttgaacctttctttggatggagcagttttgaaaaacccttttatcgaatctgcaggtagacatttggggtgctttgagggctgtggtgcaaaaggtaatgtcttcccatagaaactagactgaagcattctcagcaacttctttgtgacgtttgcattcatctcacagtgttgaacatacctttccatagagtagttttgaaacactatttttgtagaatctgcaagtggatatttggactgctctgaggccttcatcggaaacgggaatatcttcacataaacactagacagaagcattctcagaaacttctttgtggtctgtccattcaattcacagagttgaaccttcctttttatggagcagttttgaaacactgtttttggagaatccgcaagtggatatttggagcgcttagaggcctatggtagaaaaagaaatatctgcctatgacaactagacagaagcattctgagaaacttctttgtgatgtttgcattcaactaccagagttgaaccttccttttgatagggcagtttggaaacactcttttcgcagaatctgcatgtggatatctggagcgatttgaggcctactgtccaaaaggaaatatcttcctgggaaaaatagacgaaagcattctcagaaactgctttgtgatatgtgcattcgactcaccgagttgaaactttttttggatagagcagttttgaaacactctgtagaatctgaaagtggatatttggagctctttgagggctatggcggaaaagaaaatatattcacattaaactagacagcagcattctcagaaacttctttaggatgtttgcagtaaactcaaagagttgaacatacctttccgtagagcagttttgaaacactctgtttgtgggatccgcaagtggatatttggaccgctttgagacctttgctggaaatgggaatacctgcacatttacactagacagaagcattctcagaaacttcttcgtgatgtgtgcattctactcccaaatttgaatcttccttttcatgaagcagttttgaaacactctgtttgtgcaatccacaattggataattggaacgctttgatgcccatggtagaaaaggaaatatcctcatataaaaactagacacaaggattcacagaaaatgctttgtgatgtgtgcattcaaatcacggagttgaatctttcttttgtcagagcagttttgaaacactgtttctgtggaatctgccagcggacacttggagcgctttgagggctatggtggagaaggaaatatcttccctaaaaattagaaagaagcattctcagaaacatttatgtgaagcgtgcattcaactcacagagttgaaccttccctttcatacaacagttttgaaacactcttttgaacaattgcaggtgaatctttggagcgctttgaagcctttgttggaaatgggaatatcttcacacacaaactagccagaagcattctcagaaacttctttgtgatgtgtgcgttgaacccagagagatgaacctttcctttgatagagcagttttgaaacgtgtttttgtaagatctgcaagcggataattggcttcgctttgtgtcctttggtggaaacgggaatatcttctaataaaaactagacagaaatattctcagaatcttctttgtgatgtgggcattcaactaacacagttgaacctttcttttcacagagcagttttgaaacacccttttggtagaatctgccagtggatatttggagcgctttgagggctattgtgccaacggaaatatctgcccctaaaaactagacagaagcattctcagtaaactactttgtgatgtttgcattcaactcacagagttgaacatacctcttcatagagcagttttgaaaacctctttttgtagaatctgcaagtggatattcggaccactttgaggccttcataggaaacagtaatatcttcacataaaaactagatagaagcattgtcagaaagttcgttgtgatgtgtgaattcaactcacagagttgaagcttcctttaatagagcagttttgaaacactctttttctagaatctgcaagtagatatttggagcgctttgaggccttcgttggaaaccggaatatcttcacataaaaagtagatagaggcattctcagaaactttttgtgatatgtagattcaactcacagcgttgaacctttctttggatggagcagttttgaaaaactcttttatcgaatctgcaggtagacatttggggtgctttgagggctgtggtgcaaaaggaaatgtcttcccatagaaactagactgaagcattctcagcaacttcttggtgacgtttgcattcatctcacagtgttgaacatacctttccatagagtggttttgaaacactgtttttgtataatcggcaagtggatatttggactgctttcaggccttcatcggaaacgggaatatcttcacataaacactagagagaagcattctcagaaacttctttgtgatctgtccattcaactcacagagttgaaccttcctttttatggagcagttttgaatcactgtttttggagaatctgcaagtggatatttggagcgctttgaggcctatggtagaaaaagaaatatctgcctctaaaaaccagacagaagcattccgagaaacttctttgtgatgtttgcattcaactagcagagttgaaccttccttttgatagggcagtttggaaacactctttttgtagaatctgcatgtggatatctggagtggtttgaggcctacggtcaaaaaggaaatatcttcctgggaaaaatagacgaaagcattctcagaaactgctttgtgatatgtgcattcgactcaccgagtttaaacttttttttgatagagcagttttgaaacactctgtagaatctgaaagtggatatttggagctctttgagggctatggcggaaaagaaaatatattcacattaaagtagacagcagcattctcagaaacttctttaggatgtttgcagtaaactcacagagttgaacatacctttccgtaaagcagttttgaaacactctgtttgtgggatccgcaagtggatatttggaccgctttgagacctttgctggaaatgggaatatcttcacatataaactagacagaagcattctcagaaacttcttcgtgatgtgtgcattgtactcccaaatttgaatcttccttctcatggagcagttttgaaacactctgtttgtgcaatctacaattggagaattggaacgcttggatgcccgtggtagaaaaggaaatatcctcatataaaaactagacagaaggattcacagaaaatgctttgtgatgtgtgcattcaaatcacggagttgaatctttcttttgtcagagcagttttggaacactgtttctgtggaatctgccagcggacacttggagcgctttgagggctatggtggagaaggaaatatcttcccataaaaactagagagaagcattctcagaaacatttatgtgaagcgtgcattcaactcacagagttgaaccttccttttgatacaacagttttgaaacactcttttgaacaattgcaggtgaatctttggagcgctttgaagcctttgttggaaatgggaatatcttcacacacaaactagccagaagcattctcagaaacttctttgtgatgtgtgcgttgaacccagagagatgaacctttccttcgatagagcagttttgaaacgtgtttttgtaagttcggcaagcggataattggcttcgctttgtgtcctttggtggaaacgggaatatcttctaataaaaactagacagagatattctcagaaacttctttgtgatgtgggcattcaactaacacagtcgaacatttcttttcacagagcagttttgaaacactcttttggacgaatctgccagtggatatttggagcgctttgagggctattgtgccaatggaaatatctgcccctaaaaactagacagaagcattctcagaaattactttgtgatgtttgcattcaactcacagatttgaacatacctcctcatagagcagttttgaaaacatctttttgtagaatctgcaagtggatattcggaccactttgaggccttcataggaaacagtaatatcttcacagaaaaactagatagaagcattgtcagaaagttctttgtgatgtgtgaattcaactcacagagttgaaccttcctttaatagagcagttttgaaacactctttttctagaatctgcaagtagatatttggagcgctttgaggccttctttggaaaccggaatatcttcacataaaaagtagatagaggcattctcagaaactctttgtgatatgtagattcaactcacagcgttgaacctttctttggatggagcagttttgaaaaactcttttatcgaatctgcaggtagacatttggggtgctttgagggctgtggtgcaaaaggaaatgtcttcccatagaaactagcctgaagcattctcagcaacttcttggtgacgtttgcattcatctcacagtgttgaacatacctttccatagagtggttttgaaacactgtttttgtagaatcggcaagtggatatttggactgctttcaggccttcatcggaaacgggaatatcttcacataaacactagagagaagcattctcagaaacttctctgtcatctgtccattcaactcacagagttgaaccttcctttttatggagcagtttggaaacactccttttggagaatctgcaagtggatatttgcagcgctttgaggcctatggtagaaaaagaaatatctgcctctgaaaaccagacagaagcattccgagaaacttctctgtgatgtttgcattcaactagcagagttgaaccttccttttgatagggcagtttggaaacactctttttgtagaatctgcatgtggatatctggagcggtttgaggcctacggtcaaaaaggaaatatcttcctgggaaaaatagacaaaagcattctcagaaactgctttgtgatatatgcattcgactcaccgagttgaaacttttttttgatagagcagttttgaaacactctgtagaatctgaaagtggatatttggagctctttgagggctatggcggcaaagaaactatattcacattaaagtagacagcagcattcccagaaacttctttaggatgtttgcagtaaactcacagagttgaacatacctttccgtagagcagttttgaaacactctgtttgtgggatccgcaagtggatatttggacccctttgagacctttgctggaaacgggaatatcttcacatataaactagacagaagcattctcagacacttcttggtgatgtgtgcattgtactcccaaatttgaatcttccttctcatggagcagttttgaaacactctgtttgtgcaatctactattggagaattggaacgcttggatgcccgtggtagaaaaggaaatatcctcatataaaaactagacagaaggattcacagaaaatgctttgtgatgtgtgcattcaaatcacggagttgaatctttcttttgttagagcagttttgaaacactgtttctgtggaatctgccagcggacacttggagcactttgagggctacggtggagaaggaaatatcttcacataaaaactagaaagaaagcattctcagaaccatttatgtgaagcgtgcattcaactcacagtagttgaaccttccttttgatagaacagttttgaaacactcttttgaacaattgcaggtgaatatttggagggctttgaagcctttgttggaaatgggtatatcttcacacacaaactagccagaagcattctcagaaacttctttgtgatgtgtgcgttgaacccagagagatgaaccattcctttgatagagcagttttgaaacgtgttttgtaagatctgcaagcggatagttggcttcgctttgtgtcctttggtggaaacgggaatatcttctaataaaaactagacagaaatattctcagaatctcctttgtgatgtgggcattcaactaacacagttgaacatttcttttcacagagcagttttgaaacactcttttggtagtatctgccagtggatatttggagcgcttggagggctattgtgccaatggaaatatctgcccctgaaaactagacagaagcattctcagaaactacttcgtgatgtttgcattcaacacacagagttgaacatacctcttcacagagcagttttgaaaacctctttctgtacaatctgcaagtggatattcggaccactttgaggccttcataggaaacagtaatatcttcacataaaaactagacagaagcattgtcagaaagttctttgtgatgtgtgaattcaactcacagagttgaaccttcctttaatagagcagttttgaaacactctttttctagaatctgcaagtagatacttggagcgctttgaggccttcgttggaaaccggaatatcttcacaggaaaagtagatagaggcattctcagaaacttttttgtgatatgtagattcaactcacagcgttgaacctttctttggatggagcagttttgaaaaactcttttatcgaatctgcaggtagacatttggggagctttgagggctgtggtgcaaaaggaaatgtcttcccatagaaactagactgaagcattctcagcaacttctttgtgacgtttgcattcatctcacagtgttgaacatacctttccatagagtagttttgaaacactgtttttgtagaatctgcaagtggatatttggaatgctttgaggccttcatcggaaacgggaatatcttcacataaacactagagagaagcattctcagaaacttctttgtgatctgtccattcaactcacagaggtgaaccttcctttttatggagcagttttgaaacactgtttttggagaatctgcaagtggatatttggagcgctttgaggcctatggtagaaaaagaaatatctgcttctaaaaaccagacagaagcattctgagcaaacttctttgtgatgtttgcattcaactaccagagttgaaccttccttttgatagggcagtttggaaacactctttttgtagaatctgcatgtggatatctggagcgatttgaggcctacggtccaaaaggaaatatcttcctgggaaaaatagacgaaagcattctcagaaactgctttgtgatatgtgcattcgactcaccgagttgaaacttttttttgatagagcagttttgaaacactctgtagaatctgaaagtggatatttggagctctttgagggctatgtcggaaaagaaaatatattcacattaaagtagacagcagcattctcagaaacttctttaggatgtctgcagtaaactcacagagttgaacatacctttccgtagagcagttttgaaacactctgtttgtgggatccgcaagtggatatttggacagctttgagatctttgctggaaatgggaatatcttcacatataaactagacagaagcattctcagaaacttcttcgtgatgtgcgcattctactcccaaatttgaatcttccttctcatgaagcagttttgaaacactctatttgtgcaatctacaattggataattggaaccctttgatgcccatggtagaaaaggaaatatcctcatataaaaactagacagaaggattcacagaaaatgctttgtgatgtgtgcattcaaatcacggagttgaatctttcttttgttagagcagttttgaaacactgtttctgtggaatctgccagcggacacttggagtgctttgagggctatggtggagaaggaaatatcttcacataaaaactagaaagaagcattctcggaaacatttatgtgaagcgtgccttcaactcacagagttgaaccttccttttgatagaacagttttgaaacactcttttgaacaattgcaggtgaatcctttggagcgctttgaagcctttgttggaaatgggaatatcttcacacacaaactagccagaagcattctcagaaacttctttgtgatgtgtgcgttgaacccagagagatgaacctttcctttgatagagcagttttgaaacgtgtttttgtaagatcggcaagtggataattggcttcgctttgtgtcctttggtggaaacgggaatatcttctaataaaaactagacagaaatattctcagaatcttctttgtgatgtgggcattcagctaacacagttgaacgtttcttttcacagagcagttttgaaacactcttttggtagaatctgccagtggatatttggagcgatttgagggctattgtgccaatggaaatatctgcccctaaaaactagacagaagcattctcagaaactgctttgtgatgtttgcattcaactcacagtgttgaacctacctcttcatagagcagtttggaaaacctcttcttgtagaatctgcaagtggatattcggaccactttgaggccttcataggaaacagtaatatcttcacataaaaactagatagaagcattgtcagaaagttctttgtgatgtgtgaattcaactcacagagttgaaccttcctttaatagagcagttttgaaacactctttttctagaatctgcaagtagatatttggagcgctttgaggccttcgttggaaagcggaacatcttcacaggaaaagtagatagaggcattctcagaaacttttttgtgatatgtagattcaactcacagcgttgaacctttctttggatggagcagttttgaaaaactcttttatcgaatctgcaggtagacatttggggtgctttgagggctgtggcgcaaaaggaaatgtcttcccatagaaactagactgaagcattctcagcaacttctttgtgacgtttgcattcatctcacagtgttgaacatacctttccatagggtagttttgaagcactatttttgtagaatctgcaagtggatatttggactgctttgtggccttcatcggaaaggggaatatcttcacataaacactagacagaagcattctcagaaacttctttgtgatctgtccattcaactcacagagttgaaccttcctttttatggagcagttttgaaacactgtttttggagaatctgcaagtggatatttggagcgccttgaggcctatggtagaaaaagaaatatctgcctctaaaaactagacagaagcattctgagaaacttctttgtgatgtttgcattcatataccagagttgaacctttcttttgatagggcagtttggaaacactctttttgtagaatctgcatgtggatatctggagcgatttgaggcctacggtccaaaaggaaatatcttcctgggaaaaatagacgaaagcattctcagaaactgctttgtgatatgtgcattcgactcaccgagttgaaacttttttttgatagagcagttttgaaacactctgtagaatctgaaagtggatatttggagctctttgagggctatggcggaaaagaaaatatattcacattaaactagacagcagcattctcagaaagttctttaggatgtttgcagtaaactcacagagtttaacttacctttccgtagagcagctttgaaacactctgtttgtgggatccacaagtggatatttggaccgctttgagacctttgctggaaatgggaatatcttcacatataaaccagacagaagcattttcagaaacttcttcgtgatgtgtgcattctactcccaaatttgaatcttccttctcatgaagcagttttgaaacactctgtttgtgcaatccacaattggataattggaaagctttgatgcccatggtagaaaaggaaatatcctcatataaaaactagacagaaaggattcacagaaaatgctttgtgatgtgtgcattcaaatcacggagttgaatctttcttttgtcagagcagttttgaaacactgttactgtggaatcttccagcggacacttggagcgctttgagggctatggtggagaaggaaatatcttcacataaaaactagaaagaagcattctcagaaccatttatgtgaagcgtgcgttcaactcacagagttgaaccttccttttgatagaacagttttgaaacactcttttgaacaattgcaggtgaatatttggagggctttgaagcctttgttggaaatgggaatatcttcacacacaaactagccagaaacattctcagaaacttctttgtgatgtgtgcgttgaacccagagagatgaacctttcctttgaaagagcagttttgaaacgtgtttttgtaagatcggcaagcggataattggattcgctttgtgtcctttggtggaaacgcgaatatcttctaataaaaactagacagaaatattctcagaatctcctttgtgatgtgggcattcaactaacacagttgaacatttcttttcacagagcagttttgaaacactcttttggtagaatctgccagtggatatttggagcgcttggagggctactgtgccaatggaaatatcctgcccctgaaaactagacagaagcattctcagaaactgctttgtgatgtttgcattcaactcacagagttgaacatacctcttcatagatcagttttgaaaacctctttttgtagaatctgcaagtggatatttggaccactttgaggccttcatagatacagtaatatcttcacataaaaactagatggaaagcattgtcagaaagttctttgtgatgtgtgaattcaactcacagagttgaaccttcctttaatagagcagttttgaaacactctttttctagaatctgccagtagatatttggagcgctttgaggccttcgttggaaacaggaatatcttcacataaaaagtagatagaggcattctcagaaacttttttgtgatatgtagattcaactcacagcgttgaacctttctttgcatggagcagttttgaaaatcccttttatcgaatctgcaggtagacatttggggtgctttgagggctgtggtgcaaaaggaaatgtcttcccatagaaactagactgcagcattctcagcaacttcttggtgacgtttgcattcatctcacagtgttgaacatacctttccatagagtggttttgaaacactgtttttgtagaatcggcaagtggatatttggactgctttgaggccttcatcggaaacgggaatatcttcacataaacactagagagaagcatcctcagaaacttctttgtcatctgtccattcaactcacagagttgaaccttcctttttctggagcagttttgaaacactctttttggagaatctgcaagtggatatttggagcgctttgaggcctatggtagaaaaagaaatatctgcctctaaaaaccagacagaagcattccgagaaacttctctgtgatgtttgcattcaactagcagagttgaaccttccttttgatagggcagtttggaaacactctttttgtaaaatctgcatgtggatatctggagcggtttgacgcctacggtcaaaaaggaaatatcttcctgggaaaaatagacgaaagcattctcagaaagtgctttgtgatatgtgcattcgactcaccgagttgaaacttttttttgatagagcagttttgaaacactctgtagaatctgaaagtggatatttggagctctttgagggctatggcggaaaagaaaatatattcacattaaagtagacagcagcattctcagagacttctttaggatgtttgcagtaaactcacagagttcaacatacctttccgtaaagcagttttgaaaccctctgtttgtgggatctgcaagtggatatttggaccgctctgagacctttgctggaaatgggaatatcttcacatataaactagacagaaagcattctcagaaacttcttcgtgatgtgtgcattctactcccgaatttgaatcttccttttcatgaagcagttttgaaacactctgtttgtgcaatccacaattggataattggaacgctttgatgcccatggtagaaaaggaaatatcctcatataaaaactagacagaaagattcacagaaaatgctttgtgatgtgtgcattcgaatcacgcagttgaatctttcttttcttagagcagttttgaaacactgtttctgtggaatctgccagcggacacttggagcgctttgagggctatggtggagaaggaaatatcttcccataaaaactagaaagaagcattctcggaaacatttatgtgaagcgtgcattcaactcacagagttgaaccttccttttgatggaacagttttgaaacactcttttgaacaattgcaggtgaatctttggagcgctttgaagcctttgttggaaatgggaatatcttcacacacaaactagccagaagcattctcagaaacttctttgtgatgtgtgcgttgaacccagagagatgaacctttccttggatagagcagttttgaaacgtgtttttgtaagatcggcaagtggataattggcttcgctttgtgtcctttggtggaaacgggaatatcttctaataaaaactagacagaaatattctcagaatcttctttgtgatgtgggcattcaactaacacagttgaacatttcttttcacagagcagttttgaaacactcttttggtggaatctgccagtggatatttggagcgctttgagggctattgtgccaatgcaaatatcttcccctaaaaactagacagaagcattctcagaaactgcttcgggatgtttgcattcaactcacagagttgaacatacctctgcatagagcagttttgaaaacctctttttgtagaatctgcaagtggatattcggaccactttgaggccttcatgggaaacagtagtatcttcacataaaaactagatagaagcattgtcagaaagttctttgtgatgtgtgaattcaactcacagagttgaaccttcctttaatagagcagttttgaaacactctttttgtagaatctgcaagtagatttttggagcgctttgaggccttctttggaaaccggaatatcttcacataaaaagtagatagaggcattctcagaaacttttttgtgatatgtagattcaactcacagcgttgaacctttctttggatggagcagttttgaaaaactcttttattgaatctgcaggtagacatttggggtgctttgagggctgtggtgcaaaaggaaatgtcttcccatagaaactagactgaagcattctcagcaacttctttgtgacgtttgcattcatctcacagtgttgaacatacctttccatagagtagttttgaagcactatttttgtagaatctgcaagtggatatttggactgctttgaggccttcatcggaaacgggaatatcttcacataaacactagacagaagcattctcagaaacttctttgtggtctgtccattcaactcacagagttgaaccttcctttttatggagcagttttgaaacactgtttttggaggatctgcaagtggatatttggagcgctttgaggcccatggtagaaaaagaaatatgtgcctatgacaactagacagaagcattccaagaaacttctctgtgatgtttgcattcaactagcagagttgaaccttccttttgatagggcagtttggaaacactctttttgtagaatctgcatgtggatatctggagcggtttgaggcctacggtcaaaaaggaaatatcttcctgggataaatagacgaaagcattctcagaaactgctttgtgatatgtgcattcgactcaccgagttgaaacttttttttgatagagcagttttgaaacactctgtagaatctgaaagtggatatttggagctctttgagggctatggcggaaaagaaaatatattcacattaaactagagaggagcattcccagaaacttctttaggatgtttgcagtaaactcacagagttgaacatacctttccgtagagcagttttgaaacactctgtttgtggtatccgcaagtggatatttggaccgctttgagacctttgctggaaacgggaataccttcacatataaactagacagaagcattctcagaaacttcttcgtgatgtgtgcattctactcccaaatttgaatcttccttttcatgaagcagttttgaaacactctgtttgtgcaatccacaattggataattggaacgctttgatgcccatggtagaaaaggaaatatcctcatataaaaactagacagaagaattcacagaaaatgctttgtgatgtgtgcattcaaatcacggagttgaatctttcttttgtcagagcagttttgaaacactgtttctgtggaatctgccagcggacacttgcagcgctttgagggctatggtggagaaggaaatatcttcccataagaactagaaagaagcattctcagaaacatttttgtgaagcgtgcattcaactcacagagttgaaccttccttttgatacaacagttttgaaacactcttttgaacaattgcaggtgaatctttggagcgctttgaagcctttgttggaaatgggaatatcttcacacacaaactagccagaagcattctcagaaacttctttgtgatgtgtgcgttgaacccagagagatgaacctttcctttgatagagcagttttgaaacgtgtttttgtaagatctgcaagcggatagttggcttcgctttgtgtcctttggtggaaacgggaatatcttctaataaaaactagacagaaaatattctcagaatcttctttgtgatgtgggcattcagctaacacagttgaacgtttcttttcacagagcagttttgaaacactcttttggtagaatctgccagtggatatttggagcgctttgagggctattgtgccaatggaaaatctgcccctaaaaactagacagaagcattctcagaaactgctttgggatgtttgcattcaactcacagagttgaacatacctctgcatagagcagttttgaaaacctctttttgtagaatctgcaagtggatattcggaccactttgaggccttcataggaaacagtaatatcatcacataaaaactagatagaagcattgtcaggaagttctttgtgatgtgtgaattaaactcacagagttgaaacttcctttaatagagcagtgttgaaacactctttttctagaatctgcaagtagatatttggggcgcttggaggccttcgttgtaaaccggaatatcttcacaggaaatgtagatagaggcattctcagaaacttttttgtgatatgtagattcaactcacagcgttgaacctttctttggatggagcagttttgaaaaactcttttatcgaatctgcaggtagacatttggggtgctttgagggctgtggtgcaaaaggaaatgtcttcccatagaaactagactgaagcattctcagcaacttcttggtgacgtttgcattcatctcacagtgttgaacatacctttccatagagtggtcttgaaacactgtttctgtagaatcggcaagtggatatttggactgctttgaggccttcatcggaaacgggaatatcttcacataaacactagagagaagcattctcagaaacttctttgtgatctgtccgttcaactcacagagttgaaccttcctttttatggagcagttttgaaacactgtttgtggagaatctgcaagtggatatttggagcgccttgaggccaatggtagaaaaagaaatatctgcctctaaatactagactgaagcattccgagaaacttctctgtgatgtttgcattcaactagcagagttgaaacttccttttgatagggcagtttggagacactctttttttagaatctgcatgtggatatctggagcggtttgaggcctacggtcaaaaaggaaatatcttcctgggaaaaatagacgaaagcattctcagaaattgctttgtgatatgtgcattcgactcaccgagttgaaacttttttttgatagagcagttttgaaacactctgtagaatctgaaagtggatatttggagctctttgagggctatggcggaaaagaaaatatattcacattaaagtagacagcagcattcccagaaacttccttaggatgtttgcagtaaactcacagagttgaacacacctttccatagagcagttttgaaacactctgtttgtggaatccgcaagtggatatttggaccgctttgagacctttgctggaaacgggaatatcttcacatataaactggacagaagcattctcagaaacttcttcgagatgtgtgcagtctactcccgaatttgaatcttccttttcatgaagcagttttgaaacactctgtttgtgcaatccacaattggataattggaacgctttgatgcccatggtagaaaaggaaatatcctcatataaaaactagacagaaggattcacagaaaatgctttgtgatgtgtgcattcaaatcacggagttgaatctttcttttgtcagagcagttttgaaacactgtttctgtggaatctgccagcggacacttgcagcgctttgagggctatggtggagaaggaaatatcttcccataagaactagaaagaagcattctcagaaacatttatgtgaagcgtgcattcaactcatagagttgaaccttccttttgatacaacagttttgaaacactctttggaacaattgcaggtgaatctttggagcgctttgaagcctttgttggaaatgggaatatcttcacacacaaactagccagaagcattctcagaaacttctttgtgatgtgtgcgttgaacccagagagatgaacctttcctttgatagagcagttttgaaacgtgtttttgtaagatcggcaagcggataattggcttcgctttgtgtcctttggtggaaacgggcatgtcttctaataaaaactagacagagatattctcagaaacttctttgtgatgtgggcattcacctaacacagttgaacatttcttttcacaaagcagttttgaaacactcctttggtcgaatctgccagtggatatttggagcgctttgagggctattgtgccaatggaaatatctgcccctaaaaactagacagaagcattctcagaaactgctttgtgatgtttgcattcaactcacagagttgaacatacctcttcatagagcagttttgaaaacccctttttgtagaatctgcaagtggatatttggaccactttgaggccttcatagaaaacagtaatatcctcacataaaaactagatggaaacattgtcagaaagttctttgtgatgtgtgaattcaactcacagagttgaaccttcctttaatagagcagttttgaaacactctttttctagaatctgcaagtagatatttggagcgctttgaggccttcgttggaaaccggaatatcttcacaggaaaagtagatagaggcattctcagaaacctttttgtgatatgtagattcaactcacagagttgaacctttctttggatggagcagttttgaaaaacccttttatcgaatctgcaggtagacattcggggtgctttgagggctgtggtgcaaaaggaaatgtcttcccatagaaacttgactgaagccttctcagcaacttctttgtgacgtttgcattcatctcacagtgttgaacatgcctttccctagagtagttttgaaacactatttttgtagaatctgcaagtggacatttggactgctttgaggccttcatcggaaacgggaatatcttcacataaacactagacagaagcattctcagaaacttctttgtgatctgtccattcaactcacagagttgaaccctcctttttatggagcagttttgaaacactgtttttggagaatctgcaagtggatatttggagcgctttgaggcctatggtagaaaaagaaatatctgcccctaaaaactagacagaagcattctgagaaacttctttgtgatgtttacattcacctaccagagttgaaccttccttttgatagggcagtttggaaacactctttttgtagaatctgcatgtggatatctggagcgatttgaggcctactgtccaaaaggaaatatcttcctgggaaagatagacgaaagcattctcagtaaactgctttgtgatatgtgcattcgactcaccgagttgaaacatttttttgatagagcagttttgaaacactctgtagaatctgaaagtggatatttggagctctttgagggctatggcggaaaagaaaatatattcacattaaactagacagccagcattctcagaaacttctttaggatgtttgcagtaaactcacagagttgaacatacctttccgtagagcagttttgaaacactctgtttgtgggatccgcaagtggatatttggaccgctttgagacctttgctggaaatgggaatatctgcacatataaactagacagagcattctcagaaacttcttcgtgatgtgtgcattgtactcccaaatttgcatcttccttctcatggagcagttttgaaacactctgtttgtgcaatctacaattggagaattggaacgcttggatgcctgtggtagaaaaggaaatatcctcatataaaaactagacagaaggattcacagaaaacgctttgtgatgtgtgcattcaaatcacggagttgaatctttcttttgttagagcagttttgaaacactgtttctgtggaatctgccagcggacacttggagcgctttgagggctatggtggagaaggaaatatcttcacataaaaactagaaagaagcattctcagaaacatttatgtgaagcgtgcattcaactcacagagttgaaccttccttttgatacaacagttttgaaacactcttttgaacaattgcaggtgaatctttggagcgctttgaagcctttgttggaaatgggaatatcttcacacacaaactagccggaagcattctcagaaacttctttgtgatgtgtgcgttgaacccagagagatgaacctttcctttgatagagcagttttgaaacgtgtttttgtaagatcggcaagcggataattggcttcgctttgtgtcctttggtggaaacgggaatatcttctaataaaaactagacagaaatattctcagaatctcctttgtgatgtgggcattcaactaacacaattgaacatttcttttcacagagcagttttgaaacacagttttggtagaatctgccagtggatatttggagcgcttggagggctactgtgccaatggaaatatctgcccctgaaaactagacagaagcattctcagaaactgcttcgtgatgtttgcattcaactcacagggttgaacatacctctgcatagagcagttttgaaaacctctttttgtagaatctgcaagtggatattcggaccactttgaggatttcataggaaacagtaatatcttcacataaaaactagatagaagcattgtcagaaagttctttgtgatgtgtgaattcaactcacagagttgaaccttcctttattagagcagttttgaaacactctttttctagaatctgcaagtagatatttggagggctttgaggccttcgttggaaaccggaatatcttcacataaaaagtagatagaggcattctcagaaacttttttgtgatatgtagattcaactcacagtgttgaacctttctttggatggagcagttttgaaaaactcttttatcgaatgtgcaggtagacatttggggtgctttgagggctgtggtgcaaaaggaaatgtcttcccatagaaactagactgaagcattctcagcaacttcttggtgacgtttgcattcatctcacagtgttgaacatacctttccatagagtggttttgaaacactctttttgtagaatcggcaagtggatatttggactgctttcaggccttcatcggaaacgggaatatcttcacataaacaccagagagaagcattctcagaaacttctttgtcatctgtccattcaactcacagagttgaaccttcctttttatggagcagttttgaaacactcattttggagaatctgcaagtggatatttggagcgctttgaggcctatggtagaaaaagaaatatctgcctctaaaaaccagacagaagcattctgagaaacttctttgtgatgtttacattcaactaccagagttgaaccttccttttgatagggcagttcggaaacactccttttgtagaatctgcatgtggatatctggagcgatttgaggcctacggtccaaaaggaaatatcttcctgggaaaaatggacgaaagcattctcagaaagtgctttgtgatatgtgcattcgactcaccgagttgaaacttttttttgatagagcagttttgaaacactctgtagaatctgaaagtggatatttggagctctttgagggctatggcggaaaagaaaatatattcacgttaaaaaagtagacagcagcattctcagaaacttctttaggatgtttgcagtaaactcacagagttgaacatacctttccatagagcagttttgaaacactctgtttgtgggatccgcaaggggatatttggaccgctttgagacctttgctggaaatgggaatatcttcacatataaactagacagaagcattctcagaaacttctttcgtgatgtgtgcattctcctcccgaatttgaatcttccttttcatgaagcagttttgaaacactctgtttgtgcaatccacaattggataattggaacgctttgatgcccatggtagaaaaggaaatatcctcatataaaaactagacagaaggattcacagaaaatgctttgtgatgtgtgcattcaaatcacggagttgaatctttcttttgttagatcagttttgaaacactgtttctgtggaatctgccagcggacacttggagcgctttgagggctacggtggagaaggaaatatcttcacatagaaactagaaagaagcattctcagaaccatttatgtgaagcgtgcattcaactcacagcagttgaaccttccttttgatagaacagttttgaaacactcttttgaacaattgcaggtgaatatttggagggctttgaagcctttgttggaaatgggaatatcttcacacacgaactagccagaagcattctcagaaacttctttgtgatgtgtgcgttgaacccagagagatgaacctttcctttgatagagcagttttgaaacgtgtttttgtaagatctgcaagcggatagttggcttcgctttgtgtcctttggtggaaacgggaatatcttctaataaaaactagacagaaaatattctcacaatctcctttgtgatgtgggcattcaactaacacagttgaacatttcttttcacagagcagttttgaaacactcttttggtagaatctgccagtggatatttggagcgctttgagggctgttgtgccaatggaaatatctgcccctaaaatctagacagaagcattctcagaaactacttcgtgatgtttgcattcaactcacagagttgaacatacctcttcacagagcagttttgaaaacctctttttgtagaatctgcaagtggatattcggagcactttgaggccttcataggaaacagtaatatcttcgcataaaaactagatagaagcattgtcagaaagttctttgtgatgtgtgaattcaactcacagagttgaaccttcctttaatagagcagttttgaaacactctttttctagaatctgccagtagatatttggagcgctttgagtccttcgttggaaaccggaatatcttcacataaaaagtagatagaggcattctcagaaacttttttgtgatatgtagattcaactcacagcgttgaacctttctttggatggagcagttttgaaaaactcttttatcgaatctgcaggtagactttcggggtgctttgagggctgtggtgcaaaaggaaatgtcttcccatagaaactagactgaagcattctcagcaacttcttttgacgtttgcattcatctcacagtgttgaacatacctttccatagagtagttttgaaacactgtttttgtagaatcggcaagtggatatttggactgctttgaggccttcatcggaaacgggaatatcttcacataaacactagagagaagcattctcagaaacttctttgtggtctgtccattcaactcacagagttaaaccttactttttatggagcagttttgaaacactgttttcggacgaactgcaagtggatatttggagcgctttgaggcctatggtagaaaaagaaatatctgcctatgacagctagacagaagcattccgagaaacttctttgtgatgtttgcattcaactagcagagttgaaccttccttttgatagggcagtttggaaacactctttttgtagaatctgcatgtggatatctggagcggtttgaggcctacggtcaaaaaggaaatatcttcctgggaaaaatagacgaaagcattctcagaaactgctttgtgatatgtgcattcgactctccgagttgaaactttctttggatagagcagttttgaaacactctgtagaatctgaaagtggatatttggagctctttgagggctatggcggaaaagaaaagatattcacattaaactagacagcagcattctcagaaacttctttaggatgtttgcagtaaactcacagagttgaacctacctttccgtagagcagttttgaaacactctgtttgtgggatccgcaagtggatatttggaccgctttgagacctttgctggaaatgggaatatcttcacatatagaactagacagaagcattctcagaaacttcttcgtgatgtgtgcattctactcccaaatttgaatcttccttctcattaagcagttttgaaacactctatttgtgcaatctacaattggagaattggaacacttggatgcccgtggttgaaaaggaaatatcctcatataaaaactagacagaaggattcacagaaaatgctttgtgatgtgtgcattcaaatcacggagttgaatctttcttttgttagagcagttttgaaacactgtttctgtggaatctgccagcggacacttggagcgctttgagggctatggtggagaaggaaacatcttcccataaaaactagaaagaagcattctcagaaccatttatgtgaagcgtccattcaactcacagagttgaaccttccttttgatagaacagttttgaaacactcttttgaacaattgcaggtgaatatttggagggctttgaagcctttgttggaaatgggaatatcttcacacacaaactagccagaagcattctcagaaacttctttgtgatgtgtgcgttgaacccagagagatgaacctttcctttgatagagcagttttgaaacgtgtttttgtaaggtctgcaagcggataatgggcttcgctttgtgtcctttggtggaaacgggaacatcttctaattaaaactagacagaaatattctcagaatctcctttgtgatgtgggcattcaactaacacaattgaacatttcttttcacagagcagttttgaaacacagttttggtagaatctgccagtggatatttggagcgcttggagggctattttgccaatggaaatatctgcccctgaaaactagacagaagcattctcagaaactacttcgtgatgtttgcattcaacacacagagttgaacatacctcttcacagagcagttttgaaaacctctttctgtagaatctgcaagtggatattcggaccactttgaggccttcataggaaacagaaatatcttcacataaaaactagatagaagcattgacagaaagttctttgtgatgtgtgaattcaactcacagagttgaaccttcctttaatagagcagttttgaaacactctttttctagaatctgcaagtagatatttggagcgctttgaggccttcgttggaaaccggaatatcttcacaggaaaagtagatagaggcattctcagaaacttttttgtgatatgtagattcaactcacaagcgttgaacctttctttggatggagcagttttgaaaaactcttttatcgaatctgcaggtagacatttggggagctttgagggctgtggtgcaaaaggaaatgtcttcccatagaaactagactgaagcattctcagcaacttcttggtgacgtttgcattcatctcacagtgttgaacatacctttccatagagtagttttgaaacactgtttttgtagaatcggcaagtggatatttggactgctttgaggccttcatcggaaacgggaatatcttcacataaacactagagagaagcattctcagaaacttctttgtgatctgtccattcaacccacagagttgaaccttcctttttatggagcagttttgaaacactccttttgaagaatctgcaagtggatatttggagcgctttgaggcctatggtagaaaaagaaatatctgcctctaaaaaccagacagaagaattctgagaaacttctttgtgatgtttgcattcaactaccagaggtgaaccttccttttgatagggcagtttggaaacactctttttgtagaatctgcatgtggatatctggagcgatttgaggcctacggtccaaaaggaaatatcttcctgggaaaaatagacgaaagcattctcagaaactgctttgtgatatgtgcattcgactcaccgagttgaaactttttttggatagagcagttttgaaacactctgtagaatctgaaagtggatatttggagctctttgagggctatggcggaaaagaaaatatattcacaataaaccagacagcagcactctcagaaacttctttaggatgtttacagtaaactcacagagttgaacatacctttccgtagagcagttttgaaacactctgtttgtgggatccgcaagtggatatttggacctctttgagacctttgctggaaatgggaatatcttcacatataaactagacagaaagcattctcagaaacttcttcgtgatgtgtgcattctcctcgcaaatttgaatcttccttttcatgaagcagttttgaaacactctgtttgtgcaatccacaattggataattggaacgctttgatgcccatggtagaaaaggaaatatcctcatataaaaactagacagaaggattcacagaaaatgctttgtgatgtgtgcattcaaatcacggagttgaatctttcttttgtcagagcagttttgaaacactgtttctgtggaatctgccagcggacacttggaacgctttgagggctacggtggagaaggaaatatcttcccataaaaactagaaagaagcattctcagaaacatttatgtgaagcgtgcattcaactcacagagttgaaccttccttttgatacaacagttttgaaacactcttttgaacaattgcaggtgaatctttggagcgctttgaagcctttgttggaaatgggaatatcttcacacacaaactagccagaagcattctcagaaacttctttgtgatgtgtgcgttgaacccagagagatgaacctttccttcgatagagcagttttgaatcgcgtttttgtaagatcggcaagcggataattggcttcgctttgtgtcctttggtggaaacgggaatatcttctaataaaaactagacagaaatattctcagaatctcctttgtgatgtgggcattcaactaacacagttgaacatttcttttcacagagcagttttgaaacactcttttggtcgaatatgccagtggatatttggagcgcttggagggctattgtgccaatggaaatatctgcccctgaaaactagacagaagcattctcagaaactgctttgtgatgtttgcattcaactcacagagttgaacataccttttcatagagcagttttgaaaacctctttttgtagaatctgcaagaggatattcggaccactttgaggccttcataggaaacagtaatatcttcacataaaaactagatagaagcattgtcagaaagttctttgtgatgtgtgaattccactcacagagttgaaccttcctttaatagagcagttttgaaacactctttttctagaatctgcaagtagatatttggagcgctttgaggccttctttggaaaccggaatatcttcacataaaaagtagatagaggcattctcagaaactttttcgtgatatgtggattcaactcacagcgttgaacctttcttttgatagagcagttttggaaaactcttttatcgaatctgcaagtagacatttggagtgctttgagggctgtggtgcaaaaggaaatgtcttcccatagaaactagactgaagcattctcagcaacttctttgtgacgtttgcattcatctcacagtgttgaacatacctttccatagagtagttttgaaacactatttttgtagaatctgcaagtggatatttggactgctttgaggccttcatcggaaacgggaatatcttcacataaacactagacggaagcattctcagaaacttctttgtgatctgtccattcaactcacaggagttgaaccttcctttttatggagcagttttgaatcactgtttttggagaatctgcaagtggatatttggagcgctttgaggcctatggtagaaaaagaaatatctgcctctaaaaaccagacagaagcattctgagaaacttctttgtgatgtttgcattcaactaccagagttgaaccttccttttgatagggcagtttggaaacactctttttgtagaatctgcatgtggatatctggagcgatttgaggcctacggtcaaaaaggaaatatcttcctgggaaaaatagacgaaagcattctcagaaagtgctttgtgatatgtgcattcgactcaccgagttgaaacttttttttgatagagcagttttgaaacactctgtagaatctgaaagtggatatttggagctccttgagggctatggcggaaaagaaaatatattcacattaaagtagacagcagcattctcagaaacttctttaggatgtttgcagtaaactcgcagagtttaacatacctttccgtagagcagttttgaaacactctgtttgtgggatccgcaagtggatatttggaccgctttgagacctttgctggaaatgggaatatcttgacgtataaactagacagaagcattctcagaaacttcttcgtgatgtgtgcattgtactcccaaatttgaatcttccttctcatggagcagttttgaaacactctgtttgtgcaatctacaattggagaattggaacgcttggatgcccgtggtagaaaaggaaatatcctcatataaaaactagacagaaaggattcacagaaaatgctttgtgatgtgtgcattcaaatcacggagttgaatttttcttttgttagagcagttttgaaacactgtttctgtggaatctgccagcggacacttggagcgctttgagggctatggtggagaaggaaatatcttcacataaaaactagaaagaagcattctcagaaccatttatgtgaagcgtgcgttcaactcacagagttgaaccttccttttgatagaacagttttgaaacactcttttgaacaattgcaggtgaacatttggagggctttgaagcctttgttggaaatgggaatatcttcacacacaaactagccagaagcattctcagaaatttctttgtgatgtgtgcgttgaacccagagagatgaacctttcctttgatagagcagttttgaaacgtgtttttgtaagatctgcaagcggatagttggcttcgctgtgtgtcctttggtggaaacgggaatatcttctaataaaaactagacagaaatattctcagaatcttctttgtgatgcgggcattcacctaacacagttgaacgtttcttttcacagagcagttttgaaacactcttttggtagaatctgccagtggatatttggagcgctttaagggctattgtgccaatggaaatatctgcccctaaaaactagacagaagcattctcagaaactacttcgtgatgtttgcattcaacacacagagttgaacatacctcttcacagagcagttttgaaaacctctttctgtagaatctgcaagtggatattcggaccactttgaggccttcataggaaacagtaatatcttcgcataaaaactagatagaagcattgtcagaaagtactttgtgatgtgtgaattcaactcacagagttgaaccttcctttaatagagcagttttgaaacactctttttctagaatctgcaagtagatatttggagcgctttgaggccttcgttggaatccggaatatcttcacataaaacgtagatagaggcatgctcagaaacttttttgtcatatgtagattcaactcacagcgttgaacctttcttttgatagagcagttttgaaaaactcttttatcgaatctgcaagtagacatttggagtgctttgagggctctggtgcaaaaggaaatgtcttcccatagaaactagactgaatcattctcagcaacttcttggtgacgattgcattcatctcacagtgttgaacatacctttgcatagagtagtttcgaaacactatttttgtagaatctgcaagtggacatttggactgctttgaggccttcatcggaaacgggaatatcttcacataaacactagacagaagcattctcagaaacttctttgtgatctgtccattcacctcacagagctgaactttcctttttatggagcagttttgaaaaactgtttttggagaatctgcaagtggatatttggagcgctttgaggcttatggtagaaaaaaaatatctgcccctaaaaaccagacagaagcattctgagaaacttctttgtgatgtttgccttcaactaccagagttgaaccttccttttgatagggcagtttggaaacactctttttgtagaatctgcatgtggatatctggagcgatttgaggcctacggtccaaaaggaaatatcttcctgggaaagatagacgaaagcattctcagaaactgctttgtgatatgtgcattcgactcaccgagttgaaacttttttttgatagagcagttttgaaacactctgtagaatctgaaagtggatgtttggagctctttgagggctatggcggaaaagaaaatatattcacattaaactagacagcagcattctcagaaacttctttaggatgtttgcagtaaactcacagagttgaacatacctttccgtagagcagttttgaaacactttgtttgtgggttccgcaagtggatatttggaccgctttgagacctttgctggaaatgggaatatcttcacgtataaactagacagaagcattctcagaaacttcttcctgatgtgtgcattctcctcccgaatttgaatcttccttttcatgaagcagttttgaaacactctgtttgtgcaatccacaattggataattggaacgctttgatgcccatggtagaaaaggaaatatcttcatataaaaactagacagaaggattcacagaaaatgctttgtgatgtgtgcattgaaatcacggagttgaatctttcttttgttagagcagttttgaaacactgtttctgtggaatctgccagcggacacttggagcgctttgagggctatggtggagaaggaaatatcttcacataaaaactagaaagaagcattctcagaaacatttatgtgaagcgtgcattcaactcacagagttgaaccttccttttgatacaacagttttgaaacacccttttgaacaattgcgggtgaatctttggagcgctttgaagcctttgttggaaatgggaatatcttcacacacaaactagccagaagcattctcagaaacttctttgtgatgtgtgcgttgaacccagagagatgaacctttcctttgatagagcagttttgaaacgtgtttttgtaagatcggcaagcagataactggcttagctttgtgtcctttggtggaaacgggaatatcttctaataaaaactagacagaaatattctcagaatctcctttgtgatgtgggcattcaacaaacacaattgaacatttcttttcacagagcagttttgaaacacagttttggtagaatctgccagtggatatttggagcgcttggagggctattgtgccaatggaaatatctgcccctgaaaactagacagaggaattctcagaaactactttgtgatgtttgcattcaactcacagagttgaacatacctcttcatagagcagttttgaaaacctctttttgtagaatctgcaagtggatattcggaccactttgaggccttcataggaaacagtaataccttcacataaaaattagatagaagcattgtcagaaagttctttgtgatgtgtgaattcaactcacagagttgaaccttcctttaatagagcagttttgaaacactttttttctggaatctgcaagtagatatttggagcgctttgaggccttcgttggaaaccggagtatcttcacaggaaaagtagataggggcattctcagaaacttttttgtgatatgtagattcaactcacagcgttgaacctttctttggatggagcagttttgaaaaactcttttatcgaatctgcaggtagacatttggggtgcttttagggctgtggtgcaaaaggaaatgtcttcccatagaaactagactgaagcattctcagcaacttctttgtgacgtttgcattcatctcacagtgttgaacatacctttccatagagtagttttgaagcactatttgtgtagaatctgcaagtggatatttggactgctttgaggccttcatcggaaacgggaatatcttcacataaacactagacagaagcattctcagaaacttctttgtcatctgtccattcaactcatagagttgaaccttcctttttatggagcagttttgaaacactccttttggagaatctgcaagtggatatttggagcgctttgaggccaatggtagaaaaagaaatatctgcctctaaaaaccagacagaagcattctgagaaacttctttgtgatgtttgccttcaactaccagagttgaaccttccttttgataaggcagtttggaaacactctttttgtagaatctgcatgtggatatctggagcgatttgaggcctacggtccaaaaggaaatatcttcctgggaaagatagacgaaagcattctcagaaactgctttgtgatatgtgcattcgactcaccgagttgaaactttttttggatagagcagttttgaaacactctgtagaatctgaaagtggatatttggagctctttgagggctatggcagaaaagaaaagatattcacattaaactagacagcagcattctcagaaacttctttaggatgtttgcagtaaactcacagagttgaacatacctttccgtagagcagttttgaaacactctgtttgtgggatccgcaagtggatatttggaccgctttgagacctttgctggaaatgggaatatcttcacatataaactagacagaagcattctcagaaacttcttcgtgatgtgtgcattctactcccgaatttgaatcttccttttcatgaagcagttttgaaacactctgtttgtgcaatccacaattggataattggaacgctttgatgcccatggtagaaaaggaaatatcctcatataaaaaccagacagaaggattcacagaaaatgctttgtgatgtgtgcattcaaatcacggagttgaatctttcttttgttagagcagttttgaaacacggtttctgtggaatctgccagcggacacttggagcgctttgagggctatggtggagaaggaaatatcttcccataaaaactagaaagaagcattctcagaaacatttatgtgaagccgtgcattcaactcacagagttgaaccttccttttgatagaacagttttgaaacactcttttgaacaattgcaggtgaatctttggagcgctttgaagcctttgttggaattgggaatatcttcacacacaaactagccagaagcattctcagaaacttctttgtgatgtgtgcgttgaacccagacagatgaacctttcctttgattagagcagttttgaaacgtgtttttgtaagatctgcaagcggataattggcttcgctttgtgtcctttggtggaaacgggaatatcttctaataaaaagtagacagaaatattctcagaatctcctttgtgatgtgggcattcaactaacacagttgaacatttcttttcacagagcagttttgaaacactcttttggtagaatctgccagtggatatttggagcgcttggagggctattgtgccaatggaaatatctgcccctgaaaactagacagaagcattctcagaaactacattgtgatgtttgcattcgactcacagagttgaacatacctcttcatagagcagttttgaaaaccttttttgtagaatctgcaagtggatattcggaccactttgaggccttcataggaaacagtaatatcttcacataaaaactagatagaagcattgtcaggaagttctttgtgatgtgtgaattcaactcacagagttgaaccttcctttaatagagcagttttgaaacactctttttctagaatctgcaagtagatatttggagcgcttggaggacttcgttggaaaccggaatatcttcacaggaaatgtagatagaggcattctcagaaactttttcgtgatatgtggattcaactcacagcgttgaacctttcttttgatagggcagttttgtaaaactcttttatcgaatctgtaagtagacatttggagtgctttgagggctgtggtgcaaaaggaaatgtcttcccatagaaactagactgaatcattctcagcaacttcttggtgacgtttgcattcatctcacagtgttgaacatacctttgcatagagtagtttcgaaacactatttttgtagaatctgcaagtggacatttggactgctttgaggccttcatcggaaacgggaatatcttcaacataaacactagacagaagcattctcagaaacttctttgtgatctgtccattcaactcacagagttgaaccttcctttttctggagcagttttgaaacactctttttggagaatctgcaagtggatatttggagcgctttgaggcctatggtagaaaaagaaatatctgcccctaaacaccagacagaagcattctgagaaacttctttgtgatgtttgcattcaactaccagagttgaaccttccttttgatagggcagtttggaaacactctttttgtagaatctgcatgtggatatctggagcgatttgaggcctacggtcaaaaagggaaatatcttcctgggaaaaatagacgaaagcattctcagaaactgctttgttatatatgcattcgactctccgagttgaaacttttttttgatagagcagttttgaaacactctgtagaatctgaaagtggatatttggagcactttgagggctatggcggaaaagaaattatattcacatgaatctagacagcagcattctcagagacttctttaggatgtttgcagtaaactcacagagttgaacatacctttccgtaaagcagttttgaaaccctctgtttgtgggatctgcaagtggatatttggaccgctttgagacctttgctggaaatgggaatatcttcacatataaactagacagaagcattctcagaaacttcttcgtgatgtgtgcattctcctcccgaatttgaatcttccttttcatgaagcagttttgaaacactctgtttgtgcagtccacaattggataattggaacgctttgatgcccatggtagaaaaggaaatatcctcatataaaaactagacataaggattcacagaaaatgctttgtgatgtgtgcattcaaatcacagagttgaatctttcttttgtcagagcagttttgaaacactgttactgtggaatctgccagcggacacttggagcgctttgagggctatggtggagaaggaaatatcttcccataaaaactagaaagaagcattctcagaaacatttatgtgaagcgtgcattcaactcacagagttgaaccttccttttgatacaacagttttgaaacactctttggaacaattgcaggtgaatctttggagcgctttgaagcctttgttggaaatgggaatatcttcacacacaaactagccagaagcattctcagaaacttctttgtgatgtgtgcgttgaacccagagagatgaacctttcctttgatagagcagttttgaaacgtgtttttgtaagatctgcaagcggatagttggcttcgctttgtgtacctttggtggaaacgggaatatcttctaataaaaactagacagaaatattctcagaatcttctttgtgttgtgggcattcaactaacacagttgtacgtttcttttcacagagcagttttgaaacactcttttggtagaatctgccagtggatatttggagcgctttgagggctattgtgccaatggaaatatcttcccctaaaaactagacagaagcattctcagaaactacttcgtgatgtctgcattcaacacacagagttgaacatacctcttcacagagcagttttgaaaacctctttctgtagaatctgcaagtggatattcggaccactttgaggccttcgtaggaaacagtaatatcttcacataaaaactagatagaagcattgtcagaaagttctttgtgatgtgtgaattcaactcacagagttgaaccttcctttaatagagcagttttgaaacactctttttctagaatctgcaagtagatatttggagcgctttgaggccttcgttggaaaccggaatatcttcacaggaaaagtagatagaggcattctcagaaacttttttgtgatatgtagattcaactcacagcgttgaacctttcttttgatagagcagttttgaaaaactcttttatcgaatctgcatgtagacatttggagtgctttgagggctgtggtgcaaaaggaaatgtcttcccatagaaactagactgaagcattctcagcaacttctttatgacgtttgcattcatctcacagtgttgaacatacctttccatagagtagttttgaaacactatttttatagaatctgcaagtggatatttggactgctctgaggccttcatcggaaacgggaatatcttcacataaacactagacagaagcattctcaggaaacttctttgtgatctgtccattcaactcacagagttgaaccttcctttttatggagcagttttgaatcactgtttttggagaatctgcaagtggatatttggagcgctttgaggcctatggtagaaaaagaaatatctgcttctaaaaaccagacagaagcattctgagaaacttctctgtgatgtttgcattcaactagcagagttgaaccttccttttgatagggcagtttggaaacactctttttgtagaatctgcatgtggatatctggagccgtttgaggcctacggtcaaaaaggaaatatcttcctgggaaaaatagacgaaagcattctcagaaactgctttgtgatatgtgcattcgactgaccgagttgaaacttttttttgatagagcagttttgaaacactctgtagaatctgaaagtggatatttggagctctttgagggctatggcggaaatgaaactatattcacattaaagtagacagcagcattctcagaaacttctttaggatgtttgcagtaaactcacagagttgaacctacctttccgtagagcagttttgaaacactctgtttgtgggatatgcaagtggatatttggacagctttgagaactttgctggaaatgggaatatcttcacatataaactagacagaagcattctcagaaacttcctcgtgatgtgtgcattctactcccgaatttgaatcttccttttcatgaagcaattttgaaacactctgtttgtgcgatccacaattggataattggaacgctttgatgcccatggtagaaaaggaaatatcctcatatgaaaactagacagaaggattcacagaaaatgctttgtgatgtgtgcattcaaatcacggagttgaatctttcttttgtcagagcagttttgaaacactgtttctgtggaatctgccagcggacacttggagcgctttgagggctgtggtggagaaggaaatatcttcccataaaaactagaaagaagtattctcagaaacatttatgtgaagcgtgcattcaactcacagagttgaaccttacttttgatacaacagttttgaaacactcttttgaacaattgcaggtgaatctttggagcgctttgaagcctttggtggaaatgggaatatcttcacacacaaactagccagaagcattctcagaaacttctttgtgatgtgtgcgttgaacccagagagatgaacctttcctttgatagagcagttttgaaacgtgtttttgtaagatctgcaagcggataattggcttcgctttgtgtcctttgttggaaacgggaatatcttccaataaaaactagacagaaatattctcagaatctcctttgtgatgtgggcattcaactaacacagttgaacatttcttttcacagagcagttttgaaacactcttttggtagaatctgccagtggatatttggagcgcttggagggctattgtgccaatggaaagatctgcccctgaaaactagacagaagcattctcagaaactacttcgtgatgtctgcattcaacacacagagttgaacatacctcttcacagagcagttttgaaaacctctttctgtagaatctgcaagtggatattcggaccactttgaggccttcataggaaagagtaatatcttcacataaaaactagatagaagcattgtcagaaaattctttgtgatgtgtgaattcaactcacagagttgaaccttccttcaatagagcagttgtgaaacactctttttctagaatctgcaagtagatatttggagcgctttgaggccttcgttggaatccggaatatcttcacaggaaaagtagatagaggcattttcagaaacttttttgtgatatgtagattcaactcacagcgttgaacctttctttggatggagcagttttgaaaaacccttttatcgaatctgcaggtagacatttggggtgctttgagggctgtggtgcaaaaggtaatgtcttcccatagaaactagactgaagcattctcagcaacttctttgtgacgtttgcattcatctcacagtgttgaacatacctttgcatagagtagttttgaaacactatttttgtagaatctgcaagtggatatttggactgctttgaggccttcatcggaaacgggaatatcttcacataaacactggacagaagcaatctcagaaacttctttgtgatctgtccattcaactcacagagttgaaccttcctttttatggagcagttttgaaacactgttcttggagaatctgcaagtggatatttggagcgctttgaggcctgtggtagaaaaagaaatatctgcctctaaaaactagacagaagcattctgagaaacttctttgtgatgtttgcattcaactatcagagttgaaccttccttttgatagggcagtttggaaacactctttttgtagaatctgcatgtggatatctggagcggtttgaggcctacggtcaaaaaggaaatatcttcctgggaaaaatagacgaaagcattctcagaaactgctttgtgatatgtgcattcgactctccgagttgaaactttttttggataaagcagttttgaaacactctgtagaatctgaaagtggatatttggagctctttgagggctatggcggaaaagaaaagatattcacattaaactagacagcagcattcccagaaacttctttaggatgtttgcagtaaactcacagagttgaacatacctttccgtagagcagctttgaaacactctgtgtgtgggatccgcaagtggatatttggaccgctttgagacctttgctggaaacgggaatatcttcacatataaactggacagaagcattctcagaaacttcttcgtgacgtgtgcattgtactcccaaatttgaatcttgcttctcatggagtagttttgaaacactctgtttgtgcaatctacaattggagaattggaaggcttggttgcccgtggtagaaaaggaaatatcctcatataaaaactggacagaaggattcacagaaaatgctttgtgatgtgtgcattcaaatcacggagttgaatctttcttttgttagagcagttttgaaacacggtttctgtggaatctgccagaggacacttggagcgctttgagggctatggtggagaaggaaatatcttcccataaaaactggaaagaagcattctcagaaacatttatgtgaagcgtgcattcaactcacagagttgaaccttcctttggatacaacagttttgaaacactcttttgaacaattgcaggtgaatctttggagcgctttgaagcctttgttggaaatgggaatatcttcacacacaaactagccagaagcattctcagaaacttctttgtgatgtgtgcgttgaacccagagagatgaacctttcctttgatagagcagttttgaaacgtgtttttgtaagatcggcaagcggatatttggcttcgctttgtgtcctttggtggaaacgggaatatcttctaataaaaactagacagagatattctcagaaacttctttgtgatgtgggtattcaactaacacagtcgaacatttcttttcacagagcagttttgaaacactcttttggtcgaatctgccagtggatatttggagcgctttgagggctattgtgccaatggaaatatctgcccctaaaaactagacagaagcattctcagaaactacttcgtgatgtttgcattcaacacacagagttgaacatacctcttcacagagcagttttgaaaacctctttctgtagaatctgcaagtggatattcggaccactttgaggccttcataggaaacagtaatatcttcacataaaaactagatagaagcattgtcagaaagttctttgtgatgtgtgaattcaactcacagagttgaaccttcctttaatagagcagttttgaaacactctttttctagaatctgccagtagatatttggagcgctttgaggccttctttggaaaccggaatatcttcacataaaaagtagatagaggcattctcagaaacttttttgtgatatgtagattcaactcacagcgttgaacctttctttggatggagcagtttagaaaaactcttttattgaatctgcaggtagacatttggggtgctttgagggctgtggtgcaaaaggaaatgtcttcccatagaaactagactgaagcattctcagcaacttctttgtgacgtttgcattcatctcacagtgttgaacatacctttccatagagtagttttgaaacactgtttgtgtagaatcggcaagtggatatttggactgctttgaggccttcatcggaaacgggaatatcttcacataaacactagagagaagcattctcagaaacttctttgtgatctgtccattcaactcacagagatgaccttcctttttatggagcagttttgaatcactgtttttggagaatctgcaagtggatatttggagcgctttgaggcctatggtagaaaaagaaatatctgcctctaaaaaccagacagaagcattccgagaaacttctctgtgatgtttgcattcaagtagcagagttgaaccttccttttgatagggtagtttggaaacactctttttgtagaatctgcatgtggatatctggagcggtttgaggcctacggtcaaaaaggaaatatcttcctgggaaaaatagacgaaaacattctcagaaactgctttgtgatatgtgcattcgactcaccgagttgaaactttttttggatagagcagttttgaaacactctgtagaatctgaaagtggatatttggagctctttgagggctatggcggaaaagaaaatatattcacattaaactagacagcagcattctcagaaacttctttaggatgtttgcagtaaactcacagagttgaacatacctttccgtagagcagttttgaaacactctgtttgtgggatccgcaaggggatatttggaccgctttgagacctttgctggaaatgggaatatcttcacatataaactagacagaaacattctcagaaacttcttcgtgatgtgtgcattctcctcccgaatttgaatcttccttttcatgaagcagttttgaaacactctgtttgtgcaatccacaattggataattggaacgctttgatgcccatggtagaaaaggaaatatcctcatataaaaactagacagaaggattgacagaaaatgctttgtgatgtgtgcattcaaatcacggagttgaatctttcttttgttagagcagttttgaaacactgtttctgtggaatctgccagcggacacttggagcgctttgagggctgtggtggagaaggaaatatcttcccaaaaaaactagaaagaagcattctcagaaacatttatatgaagcgtgcattcaactcacagagttgaaccttccttttgatacaacagttttgaaacactcttttgaacaattgcaggtgaatctttggagcgctttgaagcctttgttggaaatgggaatatcttcacacacaaactagccagaaatattctcagaatcttctttgtgatgtgggcattcaactaacacagttgaacatttcttttcacagagcagttttgaaacactcttttggtagaatctgccagtggatatttggagcgctttgagggctattgtgccaatgcaaatatctgcccctaaaaactagacagannnnnnnnnnnnnnnnnnnnnnnnnnnnnnnnnnnnnnnnnnnnnnnnnnnnnnnnnnnnnnnnnnnnnnnnnnnnnnnnnnnnnnnnnnnnnnnnnnnnctctgtttgtaaagtcggcaagtggatattcagacctctttgaggccttcgttggaaacgggatttcttcatattctgctagacagaagaattctcagtaacttccttgtgttgtgtgtattcaactcacagagttgaacgatcctttacacagagcagacttgaaacacactttttgtggaatttgcaagtggagatttcagcctctttgaggtcaatggtagaataagaaatatcttcctatagaaactagacagaatgattctcagaaactcctttgtgatgtgtgcgttcaactcacagagtttaacctttcttttcatagagcagttaggaaacactctgtttgtaaagtctgcaagtggatattcagacctccttgaggccttcgttggaaacgggatttcttcatattctgctagacagaagaattctcagaaacttccttgtgttgtgtgttttcaactcacagagttgaacgatcctttacacagagcagacttgaaacactctttttgtggaatttgaaagtggagatttcagccgatttgtggtcaatggtagaaaacgaaatatcttcgtacaaaaacaagacagaatgattctcagaaactcctttgtgatgtgtgcgttcaactcacagagtttaacctttcttttcatagaatagttaggaaacactctgtttgtaaagtctgcaagtggatattcagatctccttgaggccttcgttggaaacgggatttcttcatattctgctagagagaagaattctcagtaacttccttgtgttgtgtgtattcaactcacagagttcaaccatcctttacacagagcagacttgaaacactcttcttgtggaatttgcaagtggagatttcagccgctttgaggtcaatggtagaaaaggaaatatcttcgtataaatctagacagaatcattctcagaaactgctctgtgatgtgtgcgttcaactctcagagtttaacttttcttttcattcagcagtttggaaacactctgtttgtaaagtctacacgtggatattttgaccacttagagaccttcgttggaaacgggtttttttcatgtaaggctagacagaagaattcccagtaacttccttgtgttgtgtgcattcaactcacagagatgaacgttcccttagacagagcagatttgaaacactctatttgtgcaatgtgcaagtgtagatttcaagcgctttaaggtcaatggcagaaaagaaaatatcttcttttcaaaactagacagaatcattcccacaaactgcgttgtgatgttttcgttcaactcacagggtttaacctttcttttcatagagcagttaggaaacactctgtttgtaaagtctctaagtggatatactgacatcttgttgccttctttggaaacgggatttcttcatattctgctatacagaagaattctcagaaacttccttgtgttgtgtgttttcaactcacagagttgaacgatgcttcacacagagtagacttgaaacactctttttgtggaatttgcaagtggagatttcagccgctttgaggtcaatggtagaataggatatatgttcctatagaaaattgacagaatgattgtcagaaactccttggtgctgtgtgcgttcaactcacagagtttaacctttcttttcatagagcagttaggaaacactctgtttgtaaagtctgcaagtggatattcagacctctttgaggccttcgttggaaacgggatttcttcatattctgctagagagaagaattctcagtaacttccttctgttgtgtgtattcaactcacagagttcaacgatcctttacacagagcagacttgaaacactctttttgtggaatttgcaagtggacatttcagccgctttgaggtcaatggtagaaaaggatatatcttcgtataaaaactagacagaattattctcagaaactcctttgtgatgtgtgcgttcaactcacagagtttaacctttcttttcgtagagcagttaggaaacactctgtttgtaaagtcggcaagtggatattcagacctctttggggccatcgttggaaatgggatttcttcatattctgctagacagaagaattctcagtaacttccttgtgttgtgtgtattcaactgacagagttgaacgatcctttacacagagcagacttgaaacacactttttgtggattttgcaagtggagatttcagcctctttgagatcaatggtagaataggaaatatcttcctatagaaactagacagaatgattctcagaaactcctttgtgatgtgtgcgttcaacacacagagtttaacctttcttttcgtagagcagttaggaaacactctgtttgtaaagtcggcaagtggatattcagacctctttgaggccatcgttggaaatgggatttcttcatattctgctagacagaagaattctcagtaacttccttgtgttgtgtgtattcaactgacagagttgaacgatcctttacacagagcagacttgaaacactctttttgtggaatttgcaagtggagatttcagccgctttgaggtcaatggtagaaaaggaaatatctgcgtataaaaactagacagaatgattctcagaaactcctttgtgatgtgtgcgttcaactcacagagtttaacctttcttttcatagagcagttaggaaacactctgtttgtaaactctgcaagtggatattcagacatcttagaggctttcgttggaaacgggaattcttcatattctgctatacagaagaattcttagaaacttccttgtgttgtgtgttttcaactcacagagttgaacgatgctttacacagagtagacttgaaacactctttttgtggaatttgcaagtggagatttcagccgctttgaggtcaatggtagaaaaggaaatatcttcgtataaaaactagacagaatgattctcagaaactcctttgtgatgtgtgcgttaaactcacagagtttaacctttcttttcatagaacagttaggaaacactctgtttgtaaagtctgcaagtggatattcagacctctttgaggccttcgttggaaacgggatttcttcatattctgctagagagaagaattctcagtaacttctttctgttgtgtgtattcaactcacagagttcaacgatcctttacacagagcagacttgaaacagtctttttgtggaatttgcaattggagatttcagccgcattgaggtcaatggtagaaaaggaaatatcttcgtataaaaactagacagaatgattctcagaaactcctttgtgatgtgtgcgttcaactcacagagtttaacctttcttttcttagagcagttaggaaacactctgtttgtaaagtctgcaagtggatattcagacctccttgaggccttcgttggaaacgggatttcttcatattatgccagacagaagaattctcagtaacttccttgtgttgtgtgtattcaactcacagagttcaacgatcctttacacagagcagacttgaaacactcttcttgtggaatttgcaagttgagatttcagccgctttgaggtcaatggtagaatagggaatatcatcctatagaaactagacagaatgattctcagaatctcctttgtgatgtgtgcgttcaactcacagagtttaacctttcttttcgtagagcagttaggaaacactctgtttgtaaagtcggcaagtggatattcagacctcccttgaggccttcgttggaaacgggatttctacattttatgctagacagaagaattctcagtaactaccttgtgttgtgtgtattcaactcacagagttgaacgatcctttacagagagcagacttgaaacactctttttgtggaatttgcaagtggagatttcagccgctttgaggtcaatggtagaataggaaatatcttcctatagaaactagacagaatgattctcagaaactcctttgtgatgtgtgcgttcaactcacagagtttaacctttcttttcaaaaagcagttaggaaacactctgtttgtaaagtctgcaagtggatattcagacatctttgaggctttccctggaaatgggatttcttcatattctgatatacagaagaattctcagaaatttccttgtgttgtgtgttttcaactcacagagttgaacgatgctttacacagagtagacttgaaacactctttttgtggaatttgcaagtggagatttcagccgctttgaggtcaatggtagaaaaggaaatatcttcgtataaaaactagacagaatgattctcagaaactcctttgtgatgtgtgcgttcaactcacagagtttaaccttcttttcatagagcagttaggaaacactctgtttgtaaagtcnnnnnnnnnnnnnnnnnnnnnnnnnnnnnnnnnnnnnnnnnnnnnnnnnnnnnnnnnnnnnnnnnnnnnnnnnnnnnnnnnnnnnnnnnnnnnnnnnnnnttgtcatgtgtgcgttcaacacacagaatttaatcaattaggacctcttgaggcatttgttggaaaacggattcttcgtaaaatgctagactgaagaattctcaggaaattctttgtgttgtgtgtattcaactcacagagtagaaccttcctttaaacagagcagatttgaaacactctttttgtggaattttcaagtggagatttcaaacgcttgaggccaatggtagaaaaggaaatatcttcgtataaaaattagacagaatcattctcaacaactgctttgtgatgtgtgtgttcaacacagagagtttaaccaattaggacctctttgaggcatttgttggaaaatggatttcgtcgtaaaatgctggacagaagaattctcaggaacttctttgtgttgtgtgtattcaactcacagagtagaaccttcctttagacagagaagatttgaaacactctttttgtggaatttgcaactgcagatttcaagcgctttgaggccaatggtagaaaaggaaatatctttgtatacaaacaagacagaatcattctcagaaaatgctttgtgttgtgtgcattcaacacacagagtttaacctttcttttcatagagcagtttggaaacactctgtttgtaaagtctggaagtggatatttggacctctttgaggccttcattggaaacgggatttcttcatataatgctacacagaagaattctcagtaacttctttgtgttgtgggtattcacctcacagaattgaaacttcctttagacagagcaaatttcatacacactttttgtgtaatttgcaacgggagatttcaagcgctttaatgtcaatggtagaaaaagaaataacttcgtgtaaaaactagagagaatcatttccagaaagtgctttgtgatgtgtgcgttaaactcacagagtttaacctttcttttcatagagcagttgggaaacactcggtttgaaagtctgccaaaggatatttggacctccttgaggccttcgttggaaacgtgatttcatcatataatgctagaaagaagaattctcagtaacttatttgtgttgtgtgtattaacgaacagagttgaatcttccattagacagagcagatttgaaacactctctttgtcgaattttcagtaggagattccaagcgctttaaggccaaaagtagaaaagggaatatcttcgtataaaagacagacagaatcattctcagaaactacttcatgatgtgtgcgttcaactcacagagtttaacctttcttttcatggagcagtttggaaacacactgttgtaaagtgggcaagtggacatttggacctctttgaggccttggttggaaacgagatttttcatataatgctagacagaagaattctcagttacttctttgtgctgtgtgtattcaactcacagagttctacattcctttagacagagcagatttgaaacacgctttttgtggaatttgcaagtggagatttcaagcgatttgaggccaatggtagaaaaggaaatatcttcatataaaaactcgacagaatcattctcacaaactgctttgtgttgtgtgcgttccacacacggagtttaacctttcttttcatagagcagtttgcaaactctctgtttgtaaagtctgcaagtggatattggacctctttgaggccttcattggtaacgggatttcttcatataatggtggacagaagaattctgagtaacttctttgtgttgtgggtattcacctcacagaattcaaccttcctttaggcagagcagatttgaaacactctttttgaggaatttgcaagtggagatttcaagcgctttgaggccaatggtagaaaaggaaatatcttcgtataatcaccagacagaatcattctcagaaactactttgtgatgtttgctttcaactcacagagtttaacctttcttttcatagagcagtttggaaacactctgtttgtaaagtctgcaagtggatattcggacgtctttgaggccttcgttggaatggggttttcttcatataatgctagaaagaagaattctcagtaacttttttgtgttgtgtgtattcaactcacagagttgaaccttcctttagacagagcaaatttgaaacactatttttgtggaatttgcaagtggagatttcaagcgctttgaggccaatggttgaaaagaataaacttcgtataaaaactagacagaatcattctcagaaactactttgtgatgtgtgtgttcaactcagggagtttaacctttcaattcacacagcagtttgaaaacactctgtttataaagtctgcaagtggatagttgcacctctttgacgtcttcgttggaaacgggatttcttcatatgatgctacgcagaagaatcacagnnnnnnnnnnnnnnnnnnnnnnnnnnnnnnnnnnnnnnnnnnnnnnnnnnnnnnnnnnnnnnnnnnnnnnnnnnnnnnnnnnnnnnnnnnnnnnnnnnnnnnnnnnnnnnnnnnnnnnnnnnnnnnnnnnnnnnnnnnnnnnnnnnnnnnnnnnnnnnnnnnnnnnnnnnnnnnnnnnnnnnnnnnnnnnnnnnnnnnnnnnnnnnnnnnnnnnnnnnnnnnnnnnnnnnnnnnnnnnnnnnnnnnnnnnnnnnnnnnnnnnnnnnnnnnnnnnnnnnnnnnnnnnnnnnnnnnnnnnnnnnnnnnnnnnnnnnnnnnnnnnnnnnnnnnnnnnnnnnnnnnnnnnnnnnnnnnnnnnnnnnnnnnnnnnnnnnnnnnnnnnnnnnnnnnnnnnnnnnnnnnnnnnnnnnnnnnnnnnnnnnnnnnnnnnnnnnnnnnnnnnnnnnnnnnnnnnnnnnnnnnnnnnnnnnnnnnnnnnnnnnnnnnnnnnnnnnnnnnnnnnnnnnnnnnnnnnnnnnnnnnnnnnnnnnnnnnnnnnnnnnnnnnnnnnnnnnnnnnnnnnnnnnnnnnnnnnnnnnnnnnnnnnnnnnnnnnnnnnnnnnnnnnnnnnnnnnnnnnnnnnnnnnnnnnnnnnnnnnnnnnnnnnnnnnnnnnnnnnnnnnnnnnnnnnnnnnnnnnnnnnnnnnnnnnnnnnnnnnnnnnnnnnnnnnnnnnnnnnnnnnnnnnnnnnnnnnnnnnnnnnnnnnnnnnnnnnnnnnnnnnnnnnnnnnnnnnnnnnnnnnnnnnnnnnnnnnnnnnnnnnnnnnnnnnnnnnnnnnnnnnnnnnnnnnnnnnnnnnnnnnnnnnnnnnnnnnnnnnnnnnnnnnnnnnnnnnnnnnnnnnnnnnnnnnnnnnnnnnnnnnnnnnnnnnnnnnnnnnnnnnnnnnnnnnnnnnnnnnnnnnnnnnnnnnnnnnnnnnnnnnnnnnnnnnnnnnnnnnnnnnnnnnnnnnnnnnnnnnnnnnnnnnnnnnnnnnnnnnnnnnnnnnnnnnnnnnnnnnnnnnnnnnnnnnnnnnnnnnnnnnnnnnnnnnnnnnnnnnnnnnnnnnnnnnnnnnnnnnnnnnnnnnnnnnnnnnnnnnnnnnnnnnnnnnnnnnnnnnnnnnnnnnnnnnnnnnnnnnnnnnnnnnnnnnnnnnnnnnnnnnnnnnnnnnnnnnnnnnnnnnnnnnnnnnnnnnnnnnnnnnnnnnnnnnnnnnnnnnnnnnnnnnnnnnnnnnnnnnnnnnnnnnnnnnnnnnnnnnnnnnnnnnnnnnnnnnnnnnnnnnnnnnnnnnnnnnnnnnnnnnnnnnnnnnnnnnnnnnnnnnnnnnnnnnnnnnnnnnnnnnnnnnnnnnnnnnnnnnnnnnnnnnnnnnnnnnnnnnnnnnnnnnnnnnnnnnnnnnnnnnnnnnnnnnnnnnnnnnnnnnnnnnnnnnnnnnnnnnnnnnnnnnnnnnnnnnnnnnnnnnnnnnnnnnnnnnnnnnnnnnnnnnnnnnnnnnnnnnnnnnnnnnnnnnnnnnnnnnnnnnnnnnnnnnnnnnnnnnnnnnnnnnnnnnnnnnnnnnnnnnnnnnnnnnnnnnnnnnnnnnnnnnnnnnnnnnnnnnnnnnnnnnnnnnnnnnnnnnnnnnnnnnnnnnnnnnnnnnnnnnnnnnnnnnnnnnnnnnnnnnnnnnnnnnnnnnnnnnnnnnnnnnnnnnnnnnnnnnnnnnnnnnnnnnnnnnnnnnnnnnnnnnnnnnnnnnnnnnnnnnnnnnnnnnnnnnnnnnnnnnnnnnnnnnnnnnnnnnnnnnnnnnnnnnnnnnnnnnnnnnnnnnnnnnnnnnnnnnnnnnnnnnnnnnnnnnnnnnnnnnnnnnnnnnnnnnnnnnnnnnnnnnnnnnnnnnnnnnnnnnnnnnnnnnnnnnnnnnnnnnnnnnnnnnnnnnnnnnnnnnnnnnnnnnnnnnnnnnnnnnnnnnnnnnnnnnnnnnnnnnnnnnnnnnnnnnnnnnnnnnnnnnnnnnnnnnnnnnnnnnnnnnnnnnnnnnnnnnnnnnnnnnnnnnnnnnnnnnnnnnnnnnnnnnnnnnnnnnnnnnnnnnnnnnnnnnnnnnnnnnnnnnnnnnnnnnnnnnnnnnnnnnnnnnnnnnnnnnnnnnnnnnnnnnnnnnnnnnnnnnnnnnnnnnnnnnnnnnnnnnnnnnnnnnnnnnnnnnnnnnnnnnnnnnnnnnnnnnnnnnnnnnnnnnnnnnnnnnnnnnnnnnnnnnnnnnnnnnnnnnnnnnnnnnnnnnnnnnnnnnnnnnnnnnnnnnnnnnnnnnnnnnnnnnnnnnnnnnnnnnnnnnnnnnnnnnnnnnnnnnnnnnnnnnnnnnnnnnnnnnnnnnnnnnnnnnnnnnnnnnnnnnnnnnnnnnnnnnnnnnnnnnnnnnnnnnnnnnnnnnnnnnnnnnnnnnnnnnnnnnnnnnnnnnnnnnnnnnnnnnnnnnnnnnnnnnnnnnnnnnnnnnnnnnnnnnnnnnnnnnnnnnnnnnnnnnnnnnnnnnnnnnnnnnnnnnnnnnnnnnnnnnnnnnnnnnnnnnnnnnnnnnnnnnnnnnnnnnnnnnnnnnnnnnnnnnnnnnnnnnnnnnnnnnnnnnnnnnnnnnnnnnnnnnnnnnnnnnnnnnnnnnnnnnnnnnnnnnnnnnnnnnnnnnnnnnnnnnnnnnnnnnnnnnnnnnnnnnnnnnnnnnnnnnnnnnnnnnnnnnnnnnnnnnnnnnnnnnnnnnnnnnnnnnnnnnnnnnnnnnnnnnnnnnnnnnnnnnnnnnnnnnnnnnnnnnnnnnnnnnnnnnnnnnnnnnnnnnnnnnnnnnnnnnnnnnnnnnnnnnnnnnnnnnnnnnnnnnnnnnnnnnnnnnnnnnnnnnnnnnnnnnnnnnnnnnnnnnnnnnnnnnnnnnnnnnnnnnnnnnnnnnnnnnnnnnnnnnnnnnnnnnnnnnnnnnnnnnnnnnnnnnnnnnnnnnnnnnnnnnnnnnnnnnnnnnnnnnnnnnnnnnnnnnnnnnnnnnnnnnnnnnnnnnnnnnnnnnnnnnnnnnnnnnnnnnnnnnnnnnnnnnnnnnnnnnnnnnnnnnnnnnnnnnnnnnnnnnnnnnnnnnnnnnnnnnnnnnnnnnnnnnnnnnnnnnnnnnnnnnnnnnnnnnnnnnnnnnnnnnnnnnnnnnnnnnnnnnnnnnnnnnnnnnnnnnnnnnnnnnnnnnnnnnnnnnnnnnnnnnnnnnnnnnnnnnnnnnnnnnnnnnnnnnnnnnnnnnnnnnnnnnnnnnnnnnnnnnnnnnnnnnnnnnnnnnnnnnnnnnnnnnnnnnnnnnnnnnnnnnnnnnnnnnnnnnnnnnnnnnnnnnnnnnnnnnnnnnnnnnnnnnnnnnnnnnnnnnnnnnnnnnnnnnnnnnnnnnnnnnnnnnnnnnnnnnnnnnnnnnnnnnnnnnnnnnnnnnnnnnnnnnnnnnnnnnnnnnnnnnnnnnnnnnnnnnnnnnnnnnnnnnnnnnnnnnnnnnnnnnnnnnnnnnnnnnnnnnnnnnnnnnnnnnnnnnnnnnnnnnnnnnnnnnnnnnnnnnnnnnnnnnnnnnnnnnnnnnnnnnnnnnnnnnnnnnnnnnnnnnnnnnnnnnnnnnnnnnnnnnnnnnnnnnnnnnnnnnnnnnnnnnnnnnnnnnnnnnnnnnnnnnnnnnnnnnnnnnnnnnnnnnnnnnnnnnnnnnnnnnnnnnnnnnnnnnnnnnnnnnnnnnnnnnnnnnnnnnnnnnnnnnnnnnnnnnnnnnnnnnnnnnnnnnnnnnnnnnnnnnnnnnnnnnnnnnnnnnnnnnnnnnnnnnnnnnnnnnnnnnnnnnnnnnnnnnnnnnnnnnnnnnnnnnnnnnnnnnnnnnnnnnnnnnnnnnnnnnnnnnnnnnnnnnnnnnnnnnnnnnnnnnnnnnnnnnnnnnnnnnnnnnnnnnnnnnnnnnnnnnnnnnnnnnnnnnnnnnnnnnnnnnnnnnnnnnnnnnnnnnnnnnnnnnnnnnnnnnnnnnnnnnnnnnnnnnnnnnnnnnnnnnnnnnnnnnnnnnnnnnnnnnnnnnnnnnnnnnnnnnnnnnnnnnnnnnnnnnnnnnnnnnnnnnnnnnnnnnnnnnnnnnnnnnnnnnnnnnnnnnnnnnnnnnnnnnnnnnnnnnnnnnnnnnnnnnnnnnnnnnnnnnnnnnnnnnnnnnnnnnnnnnnnnnnnnnnnnnnnnnnnnnnnnnnnnnnnnnnnnnnnnnnnnnnnnnnnnnnnnnnnnnnnnnnnnnnnnnnnnnnnnnnnnnnnnnnnnnnnnnnnnnnnnnnnnnnnnnnnnnnnnnnnnnnnnnnnnnnnnnnnnnnnnnnnnnnnnnnnnnnnnnnnnnnnnnnnnnnnnnnnnnnnnnnnnnnnnnnnnnnnnnnnnnnnnnnnnnnnnnnnnnnnnnnnnnnnnnnnnnnnnnnnnnnnnnnnnnnnnnnnnnnnnnnnnnnnnnnnnnnnnnnnnnnnnnnnnnnnnnnnnnnnnnnnnnnnnnnnnnnnnnnnnnnnnnnnnnnnnnnnnnnnnnnnnnnnnnnnnnnnnnnnnnnnnnnnnnnnnnnnnnnnnnnnnnnnnnnnnnnnnnnnnnnnnnnnnnnnnnnnnnnnnnnnnnnnnnnnnnnnnnnnnnnnnnnnnnnnnnnnnnnnnnnnnnnnnnnnnnnnnnnnnnnnnnnnnnnnnnnnnnnnnnnnnnnnnnnnnnnnnnnnnnnnnnnnnnnnnnnnnnnnnnnnnnnnnnnnnnnnnnnnnnnnnnnnnnnnnnnnnnnnnnnnnnnnnnnnnnnnnnnnnnnnnnnnnnnnnnnnnnnnnnnnnnnnnnnnnnnnnnnnnnnnnnnnnnnnnnnnnnnnnnnnnnnnnnnnnnnnnnnnnnnnnnnnnnnnnnnnnnnnnnnnnnnnnnnnnnnnnnnnnnnnnnnnnnnnnnnnnnnnnnnnnnnnnnnnnnnnnnnnnnnnnnnnnnnnnnnnnnnnnnnnnnnnnnnnnnnnnnnnnnnnnnnnnnnnnnnnnnnnnnnnnnnnnnnnnnnnnnnnnnnnnnnnnnnnnnnnnnnnnnnnnnnnnnnnnnnnnnnnnnnnnnnnnnnnnnnnnnnnnnnnnnnnnnnnnnnnnnnnnnnnnnnnnnnnnnnnnnnnnnnnnnnnnnnnnnnnnnnnnnnnnnnnnnnnnnnnnnnnnnnnnnnnnnnnnnnnnnnnnnnnnnnnnnnnnnnnnnnnnnnnnnnnnnnnnnnnnnnnnnnnnnnnnnnnnnnnnnnnnnnnnnnnnnnnnnnnnnnnnnnnnnnnnnnnnnnnnnnnnnnnnnnnnnnnnnnnnnnnnnnnnnnnnnnnnnnnnnnnnnnnnnnnnnnnnnnnnnnnnnnnnnnnnnnnnnnnnnnnnnnnnnnnnnnnnnnnnnnnnnnnnnnnnnnnnnnnnnnnnnnnnnnnnnnnnnnnnnnnnnnnnnnnnnnnnnnnnnnnnnnnnnnnnnnnnnnnnnnnnnnnnnnnnnnnnnnnnnnnnnnnnnnnnnnnnnnnnnnnnnnnnnnnnnnnnnnnnnnnnnnnnnnnnnnnnnnnnnnnnnnnnnnnnnnnnnnnnnnnnnnnnnnnnnnnnnnnnnnnnnnnnnnnnnnnnnnnnnnnnnnnnnnnnnnnnnnnnnnnnnnnnnnnnnnnnnnnnnnnnnnnnnnnnnnnnnnnnnnnnnnnnnnnnnnnnnnnnnnnnnnnnnnnnnnnnnnnnnnnnnnnnnnnnnnnnnnnnnnnnnnnnnnnnnnnnnnnnnnnnnnnnnnnnnnnnnnnnnnnnnnnnnnnnnnnnnnnnnnnnnnnnnnnnnnnnnnnnnnnnnnnnnnnnnnnnnnnnnnnnnnnnnnnnnnnnnnnnnnnnnnnnnnnnnnnnnnnnnnnnnnnnnnnnnnnnnnnnnnnnnnnnnnnnnnnnnnnnnnnnnnnnnnnnnnnnnnnnnnnnnnnnnnnnnnnnnnnnnnnnnnnnnnnnnnnnnnnnnnnnnnnnnnnnnnnnnnnnnnnnnnnnnnnnnnnnnnnnnnnnnnnnnnnnnnnnnnnnnnnnnnnnnnnnnnnnnnnnnnnnnnnnnnnnnnnnnnnnnnnnnnnnnnnnnnnnnnnnnnnnnnnnnnnnnnnnnnnnnnnnnnnnnnnnnnnnnnnnnnnnnnnnnnnnnnnnnnnnnnnnnnnnnnnnnnnnnnnnnnnnnnnnnnnnnnnnnnnnnnnnnnnnnnnnnnnnnnnnnnnnnnnnnnnnnnnnnnnnnnnnnnnnnnnnnnnnnnnnnnnnnnnnnnnnnnnnnnnnnnnnnnnnnnnnnnnnnnnnnnnnnnnnnnnnnnnnnnnnnnnnnnnnnnnnnnnnnnnnnnnnnnnnnnnnnnnnnnnnnnnnnnnnnnnnnnnnnnnnnnnnnnnnnnnnnnnnnnnnnnnnnnnnnnnnnnnnnnnnnnnnnnnnnnnnnnnnnnnnnnnnnnnnnnnnnnnnnnnnnnnnnnnnnnnnngtagaaaaggaaatatcttcgcataataacaggacagaatcattcccagaaactgcgttatgatgtgtgcgtttaactcacagagtgaaacctttcttttcatagagcagtttggaaacactctgtttgtaaagtctgcaagtggatatttggacctacttgaggccttcgttgcaaacgggattttttcatataatgctagacagaagaattctcagtaacctccttgtgttgtgtgtattcaactcacagagttgaaacttcctttagacagagcagatttgaaatactcttttcgtggaatgtgcaagtggagatttcaagcgctttgaggccaatagtagaaaaggaaatatcttcgtataaaacctagacagaatcattcccagaaacagcgttgtgatgtgtgcgttcaacatacagatttaacatttcttttcatagagcatttaggaaacactctgtttgtaaagtctgcaagtggatatttggacctccttgaggccttcgttggaaacgggatttcctcatataatgctagaccgaagaattctcagtaacttccttgtgttgtgtgtattccactgacaacagctgagcctacctttagacagagccgatttgaaacactctttttgtggaatttgcaagtggagatttcaagcgctttaagttcaatgctagaaaaggaaatatcttcgtatgaaaactagacagaatcattcccaaaaactgctttgtgatgtgtgcgtagaacacacagagtttaacctttcttttcatagagccctttggaaacactctgttggtcaaactggaagtcgatattctgatctctttgaggccttcgttggaaactggatttcttcatataatgctagacagaagaattctcagtaacttccttttgttgtgtgtactcaactcacagaggtgaacgttcctttagacacagcagatttgaaaccctctttttgtggaatttgcaagtggagatttcatgtgccttgaggccaaaggcagaaaaggaaatatcttagtagaaaaacaagacagaatcattctcagaaactgctttgtgatgtatgcattcaactcaaagagtttatccttacttttcgtacagcagtttggaaacactctgttggaaaagtctgcaaacggatattttgatctctttgaggccttctttggaaacgggttttattcatgtaaggctagacagaaaaattctcagtaacatctttgtgttgtgtgtattaagctgacagagttgacacttcctctagacagagcagatttgaaacactctttttgaggaatttgcaagtgtagatttcaaaccctttgaggtcaatggtagaaaaggaaatatcttcgtataaaaactaggcagaatgattctcagaaagtgctatgtgatgtgtgcgttcaactcaaagagttttaactttcttttcatagagcagttaggaaacactctgtttgtcaaatctgcaagtcgatattcggaactagttgaggccttctttggaaacgggatttcctcatataatgctagaaagaggaattcccagtaacttccttgtgttgtgtgtactcaactcacacaggtgaactttcctttagacagagaagatttgaaacactctttttgtggaatttcaattggagatttcaagtgctttgaggccaatggtagaaacgaaatatcttcgtataaaaacaagacaaaatcattcccagaaactgtgttgtgatgtgtgcgttcaactcacagagtttaacctttcttttcattgagcagtttggataaagtctgtttttaaagtctgcaagtgtatatttggacttcttagatgccttagttggaaacgggatttcttcatataatgctagagagaagaattcttagtaactcctttgtgttgtgtgcattcaactgacagaggtgaatcttccattagacagagcagatttgaaaaacgctttttgtggaatttgcaggtggagatttcaagcggtttaaggccaatggaagaaaaggaaatatcttagtataaaaactagacagaatcattctcagaaactgatctgtgatgtgtgctttcaactcacagtttaaattttcttttcattccgcagtttggaaacactctgtttgtaaagtctgcaagtggatattttgtcctctttgagaccttcgttggaaacgggtttttttcatgaaatgctagacagaagaattctcagtaacttccttgttttgtgtgtattcaactcacagagttgaacgttcctttagacacagcagatttgaaacactctttttgtggaatttgcaagtggagatttcaagcgctttttggtcaattgcagaaatggaaatatcttcgtttcaaaactagacagaatcattcccagaaactgcgttgtgatctgggcgttcaactcacagagtttcacctttcttttcattcagcaatttggaaacactctgtttgaaaagtcagcaagtggatatttggacctccttgaggagttccttggaaacgggatttcctcatttaaggctagacagaagaattttcagtaacttcctcgtgttgtgtgtattcaactgacagagttgaaccttccttcagacagagcagattagaaacactctttttgtggaatttgcaagtggagatttcaaacgctttgaggccaacggtagaaaaggaaatatcttcgtataaaaactacacagaatctttcccataaactgctttgtcatgtgtgcgttcaactcacagagtttaacctttctgctcatacagcagtttggaaacactctgtttgtaaagtctgcaagtggatattttgacctctttgacgccgtcgttggaaacgggatttcttcatataacgctagacagaagaattctaagtaagtcctttgtgttgtctgtgttcaactcacagatgtgtacgttcctttaggcagagcagacttgaaacactcttttttgtggaatttgcaagtggagatttcgagcgctttcaggtcaatgatagaaaaggaaatatcttcgtataaaaacaagacaaaatcattcccagaaactgcgtagtgatgtgtctgtttaactaacagagtttaacctttcttttcgtacagcattttggaaacactctgttggtaaagtctgcaagtggatatttggaccacttaggtgacttcgttggaaaagggatttcttcttacaatgctagagagaagaattcttagtaacttctttgtgttgtgtgtattcaactgacagagttgagcattcctttagacagagcagacttgaaacactctttttgtggaatttgcaattagaaatttcaagcgctttgaggccaaaggcagaagaggaaatatcttcgtataaaaacaagtcagaatcattctcagaaactgctttatcatgtgtgcgttcaactcacggagtttaacctaccttttcatacagcagtttgcaaacactctgtttgtaaagtctgcaagtagatatttggacatctttgaggccttcgttggaaacgggttttattcatgtaaggctagacagaagatttctcagtaacttctttgtgttgtgtgtattcaactgacagagttgacccttcttttagacagagcagatttgaaacactctttttgtggaatttgcaagtggagatttcagacgctttgaggtcaatggtagaaaaggaaatttcttcgtataaaaacttgacagaatgattctcagaaactgcttcgtgatgtatgcgttcaattcaaannnnnnnnnnnnnnnnnnnnnnnnnnnnnnnnnnnnnnnnnnnnnnnnnnnnnnnnnnnnnnnnnnnnnnnnnnnnnnnnnnnnnnnnnnnnnnnnnnnnatcatttccacaaactgcgttgtgatgtgttcgttcaactcacagagtttaacttttcttttcatagagcagttaggaaacactctgttggtaaattctgtaagtggatattctgacatcttgtggccttcgttggaaacgggatttcttcatattctgctagacagaagaattctcagtaacttccttgtgttgtgtttattcaactctgtgagttgaatgatcctttacacagagcagacttgaaacactctttttgtggaatttgcaagtggagatttcagccgctttgaggtcaatggtagaaaagtaaatatcttcgtataaagactagacagaatgattctcagaaactcctttgtgatgtgtgcgttcaactcacagagtttaacttttcttttaatagagcagttaggaaacactctgtttgtaaagtctgcaagtggatattcagacctctttgaggccttcgttggaaacgggatttcttcatattatgctagacagaagaattctcagtaaccttccttgtgttgtgtgtattcaactcacagagttgaacgatcctttacagagagcaggcttgaaacactctttttgtcgaatttgcaagtggagatttcagccgctttgaggtcaatggtagaataggaaatatcttcttatagaaactagacagaatgattctcataaactcctttgtgatgtgtgcgtccaactcacagagtttaacctttcttttcatagagcagttaagaaacactctgtttgtaaagtctgcaagtggatattcagacctccttgaggccttcgttggaaacggggtttcttcatattctgctagacagaagaattcccagtaactttcttgtgttgtgtgtgttcaactcacagagttgaactttcatttacacagagcagatttgaaacaccctttttgtggaatttgcaaatggagatttcaagcgctttgaggccaaaggcagaaaaggaaatatcttcgtataaaaactagacagaatcattctcagaaactgctctgcgatgtgtgcgttcaactctcagagtttaacttttcttttcattcagcagtttggaaacactctgtttgtaacgtctgcacgtgaataatttgaccacttagaggccttcgttggaaacgggtttttttcatgtaaggctagacagaagaattctcagtaacttcccttgtgttgtgtgtattcaactcacagaattgaacgatcctttacacagagcagacttgaaacactctttttgtggaatttgcaagtggagatttcagccgctttgaggtcaatggtagaataggaaatatcttcgtagaaaaactagacagaaatgattctcagaaacttctttgtgatatgtgcgttcaactcacagagtttaacctttcttttcatagagcagttaggaaacactctgtttgtaaactctgcaagtggatattcagacctctttgaggccttcgttggaaacgggatttcttcatactgtgctagacagaagaattctcagtaacttccttgtgttgtgtgtattcaactcacagagttgaacgatcctttacagagagcagacttgaaacactgtttttgtggaatttgcaagtggagatttcaagagctttggggccaaaggcagaaaaggaaatatcttcgtataaaaactagacagaaatcattctcagaaactgctctgcgatgtgtgcgttcaactctcagagtttaacttttcttttcattcagcagtttggaaacactctgtttctaaagtctgcacgtggatattttgaccacttagaggccttcgttggaaacgggtttttttcctgtaaggctagacagaagaattcccagtaacttccttgtgttgtgtgcattcaactcacagagttgaacgttcccttagacagagcacatttgaaacactctatttgtgcaatttgcaattgtagatttcaagcgctttaaggtcaatggcagaaaaggaaatatcttcgttttaaaactagacagaatcattcccacaaactgcgttgtgatgtgttcgttcaactcacagagtttaacctttctgttcatagagcagttaggaaacactctgtttgtaaagtctgcaagtggatattcagacctccttgaggccttctttggaaaagggatttcttcatattctgctagacagaagaattctcagtaacttccttgtgttgtgtgtattcaactcacagagttcaacgatcctttccacagagcagacttgaaacactctttttgtggaatttgcaagtggagatttcagcggctttgaggtcaatggtagaataggaaatatcttcctatagaaactagacagaatgactctcagaaacttctttgtgatgtgtgcgttcaactcacagaatttaacctttcttttcatagagcagttaggaaacactctgtttgtaaactctgcaagtggatattcagacctctttgaggccttcgttggaaacgggatttcttcatactatgctagacagaagaattctcagtaactttcttgtgttgtgtgtattcaactcacagagttgaatgatcctttacacagagcagacttgaaacactctttttgtggaatttgcaagtggagatttcagccgctttgagttcaatggtagaataggaaatatcttcctatagaaactagacagaatgattctcagaaactcctttgtgatgtgtgcgttcaactcacagagtttaacctttcttttcatagagcagttgggaaacactctgtttgtatagtctgcaagtggatattcagacctctttgaggccttcgttggaaacgggatttcttcatattctgctagacagaagaattcccagtaacttccttgtgttgtgtgtgttcaactcacagagttgaactttcatttacacagagcagatttgaaacactctttttgtggaatttgcaagtggagatttcaagcgctttgaggtcaaaggcagaaaaggaaatatcttcgtataaaaactagacagaaatctttctcagaaactgctctgggatgtgtgcgttcaactcacagagtttaacttttcttttcattcagcagtttggaaacactctgtttggaaagtctgcacgtggatattttgacctctttgaggccttcgttggaaacgggtttttttcatgtaaggctagacagaagaattcccagtaacttccttgtgttgtgtacattcaactcacagagttgaacgttcccttagacagagcagatttgaaacaccctttttgtgcaattggcaagtggagatttcaagcgctttaaggtcaatggcagaaaaggaaatatcttcgtttcaaaactagacagaatcattcccacaaactgcgttgtgatgtgttcgttcaactcacagagtttaacctttctgttcatagagcagttaggaaacactctgtttgtaaagtctgcaagtgcatattcagacctctttgaggccttcgttggaaacgttatttcttcatattatgctagacagaagaattctcagtaacttccttgtgttgtgtgtattcacctcacagagttgaacgatcctttacacagagcagacttgtaacactctttttgtggaatttgcaagtggagatttcagccgctttgaagtcaaaggtagaaaaggaaaaatcttcctataaaaactagacagaatgattctcagaaactcctttgtgatgtgtgcgttcaactcacagagtttaacctttcttttcatagagcagttaggaaacactctgtttgtaaagtctgcaagtggatattgagacctcttcgaggccttcgttggaaacgggtttttttcatataaggctagacagaagaattctcagtaacttccttgtgttgtgtgtattcaactcacagagttgaacgatcctttacacagagcagacttgtaacactctttttgtggaatttgcaagtggagatttcagccgctttgaagtcaaagttagaaaaggaaatatcttcctataaaacctagacagaatgattctcagaaactcctttgtgatgtgtgcgttcaacacacagagtttaacttttcttttcatagagcagttagtaaacactctgtttataaagtctgcaagtggatattcagacccctttgaggccttcgttggaaacgggatttcttcatattatgatagacagaagaattcccagtaacttccttgtgttgtgtgtgttcaactcacggagttgaactttgatttacacagagcagatttgaaacactctttttgtggaatttgcaagtggagatttcaagcgctttgaggccaaaggcaggaaagggaatatcttcgtataaaaactagacagaatcattctcagaaactgctctgtgatgtgtgcgttcaactctcagagtttaacttttcttttcattcagcagtttggaaacactctgtttgtaaagtctgtacgtggataatttgaccacttagaggccttcgttggaaacgggtttttttcatgtaaggctagacagaagaattctcagtaacttccttgtgttgtgtgcattcaactcacagagttgaacgatcctttacacagagcagacttgaaacactctttttgtggaatttgcaagtggagatttcagccgctttgagttcaatggtagaataggaaatatcttcctatagaaactagacagaatgattctcagaaactcctttgtgatgtgtgcgttcaactcacagagtttaacctttcttttcatagagcagttaggaaacactgtgtttgtaaagtctgcaagtggataatcagacctctttgaggccttcgttggaaacgggatttcttcatattctgcaagacagaggaattcttagtaacttctttgtattgtgtgtattcaactcacagagttgaaccttcttttagatagagtagatttgaaacacactttttgtggaattcccaattggagatttcaagcgctttggggccaatggtagaaaaggaaaaatcttcacataaaaactagacaaaatcattctcagaaactgctctgcgatgtgtgcgttcaactctcagagtttaacttttcttttcattcagcagtttggaaacactctgtttgtaaagtctgcacgtggatattttgaccacttagagggcttcgttggaaatgggtttttttcctgtaaggctagacacaagaattctcagtaacttccttgtgttgtgtgtattcaactcacagatttgaacgatcctttacacagagcagacttgaaacactctttttgtggaatttgcaagtggagatttcagccgctttgaggtcaatggtagaaaaggaaatatcttcgtatagaaacaagacagaatgattctcagaaaatcctttgtgatgtgtgcgttcaactcacagaatttaacttttcttttcatagagccgtttggaaacactctgtttgtaaagtctgcaagtggatattcagacctctttcaggccttcgttggaaacgggatttcttcatattatgctagacagaggaattcccagtaacttccttgtgttgtgtgtgttcaactcacagagttgaactttcatttacacagagcagatttgaaacactctttttgtggaatttgcaaatggagatttcaagcgctttgaggccaaaggaagaaaaggaaatatcttcgtttcaaaactagacagaatcattctcagaaactgctgcgtgatgtgtgcgttcaactctcagagtttcacttttcttttcattcagcggtttggaaacactctgtttgtaaagtctgcacgtggatattttgaccacttagacgccttcgttggaaacgggtttttttcatgtaaggctagacagaagaattcccagtaacttccttgtgttgtgtacattcaactcacagcgttgaacgttcccttagacagagcagatttgaaacactctttttgtgcaattggcaagtagtgatttcagccgctttgaggtcaatggtagaaaaggaaatatcttcgtataaaaactagacagaatcattcccacaaactgcgatgtgatgtgttcgttcaactcacagagtttaacctttctgttcatagagcagttaggaaacactctgtttgtaaagtctgtaagtggatattctgacatcttgtggccttcgttggaaacgggatttcttcatattctgctagacagaataattctcagtaacttccttgtgttgtgtgtattcaactgacagagttgaaggatcctttacagagagcaggcttgaaacactctttttgtcgaatttgcaagtggagatttcagccgctttgaggtcaatggtagaataggaaatatcttcttatagaaactagacaaaatgattctcagaaacttctttgtgatgtgtgcgttcaactcacagagtttaacctttcttttcatagagcaggtaggaaacactctgtttgtaaactctgcaagtggatattcagacctctttgaggccttcgttggaaacgggatttcttcatactatgctagacagaagaattctcagaatcttccttgtgttgtgtgtatccaactcacagagttgaacgatggtttacacagagcagatttgaaacactctttttgtggaatttgcaagtggagatttcagccgctttgaggtccatggtagaaaaggaaatatcttcgtataaaaactaaacagaatgattctcataaattcctttgtgatgtgtgcgttcaactcacaaagtttaacctttcttttcatagagcagttaggagacactctgtttgtaaagtctgcaagtggatattcagacctctttgaggccttcgttggaaacgggatttcttcatattatgctagacagaagatttctcagtaacttccttgtgttgtgtgtattcaactgacagagttgaactttcatttagagagagcagatttgaaacactctttttgtggaatttgcaagtggagatttcaagcgctttggggccaaaggcagaaaaggaaatatcttcgtataaaaactagacagaatcattctcataaactgctctgcgatgtgtgcgttcaactctccgagtttaacttttcttttcattcagcagtttggaaacactctgtttgtaaagtctgcacgtggataatttgaccacttagaggccttcgttggaaacggtttttttttcatgtaaggctagacagaagaattcccagtaacttccttgtgttgtgtgcattcagctcacagagttgaacgttcccttagagagagcagatttgaaacacactttttgtgcaattggcaagtggagatttcaagcgctataaggtcaatggcagaaaaggaaatatcttcgtttcaaaactagacagaatcattcccacaaactgcgttgtgatgtgttcgttcaactcacagagtttaacctttctgttcatagagcagttaggaaacactctgtttctaaagtctgaaagtgcatagtctgacatcttgtggccttcgttggaaacgggatttcttcatattctgctagacagaagaattctcagaatcttccttgtgttgtgtgtattcaactcacagagttgaacgatcctttacacagagcagacttgaaacactctttttgtggaatttgcaagtggagatttcagccgctttgaggtcgatggtagaaaaggaaatatcttcgtataaaaactagacagaatcattctcagaaactgctctgcgatgtgtgcgttcaactctcagagtttaacttttctttccattcagcagtttggaaacactctgtttgtaaagtctgcacgtggatattttgaccacttagaggccttcgttggaaacgggtttttttcatgtaaggctagacagaagaattctcagtaacttccttgtgttgtgtgtattcaactcccagagttgaacgatcctttacacagagcagacttgtaacactctttttgtggaatttgcaaatggagatttcagccgctttgaagtcaaaggtagaaaaggaaatatcttcctataaaaactagacagaatgattctcagaaactcctttgtgatgtgtgcgttcaactcacagagtttaacttttcttttcatagagcagttaggaaacactctgtttgtaaagtctgcaggtggatattcagacctctttgaggccttcgttggaaacgggatttcttcatattatgctaggcagaagaattctcagtaacttccttgtgttgtgtgtattcaactgacagagttgaactttcatttagagagagcagatttgaaacactgtttttgtggaatttgcaagtggagatttcaagcgctgtggggccaaaggcagaaaaggaaatatcttcgtataaaaactagacataatcattctcagaatctgctctgtgatgtgtgcgttcaactctcagagtttaacttttcttttcattcagcagtttggaaacactctgtttgtaaagtctgcacgtggataattagaccacttagaggccttcgttggaaacgggtttttttcatgtaaggctatacagaagaattcccagtaacttccttgtgttgtgtacattcaactcacagagttgaacgttcccttagacagagcagatttgaaacactctttttgtgcaattgggaagtggagatttcaagcgctttaaggtcaatagcagaaaaggaaatatcttcgtttcaaaactagacagaatcattcccacaaactgcgttgtgatgtgttcgttcaactcacagagtttaacctttctgttcatagagcagttaggaaacactctgtttgttaagtctgtaagtggatattctgacatcttgtggccttcgttggaaacgggatttcttcatattctgctagacagaagaattcccagtaacttccttgtgttgtgtgtgttcaactcacagagttgaactttcatttacacagagcagatttgaaacactctttttgtggtatttgcaaatggagatttcagccgcgttgaggtcaatggtagaaaaggaaatatcttcgtttcaaaactagacagaacgattctcagaaactcctttgtgatgtgtgcgttcaactcacagagtttaacctttcttttcatagagcagttaggaaacactctgtttgtaaagtctgcaagtggatattcagacctccttgaggccttcgttggaaacgggatttcttcatattctggtagacagaagaattctcagtaacttccttgtgttgtgtttattcaactcacagagttgaatgatcctttacacagagcagacttgaaacactctttttggggaatttgcaagtggagatttcagccgctttgaggtcaatggtagaaaagtaaatatcttcgtataaagactagacagaatcattctcagaaactgctgcgtgatgtgtgcgttcaactctcagagtttaacttttcttttcattcagcggtttgtaaacactctgtttgtaaagtctgcacgtggatattttgaccacttagaggccttcgttggaaacgggttttttgcatgtgaggctagacagaagaattcccagtaacttccttgtgttgtgtgcattcaactcacagagttgaacgttcccttagacagagcagatttgaaacactctatttgtgcaatttgcaagtgtagttttcaagctctttaagatcaacggcagaaaaggaaatatcttcgtttcaaaactagacagaatcattcccacaaactgcgttgtgatgtgttcgttcaactcacagagtttaacttttccgttcatagagcagttaggaaacactctgtttgtaaagtctgcaagtggatattcagacctccttgaggccttcgttggaaacgggatttcttcatattctgctagacagaagaatgctcagtaacttccttgtgttgtgtttattcaactcacagagttgaacgatcctttacacagagcagacttgaaacactctttttgtggaatttgcaagtggagatttcagccgctttgaggtcaatggtagaaaaggaaactatcttcatataaagattagacagaatgattctcagaaactcctttgtgatgtgtgtgttcaactcacagagtttaacctttcttttcatagagcagttagtaaacactctgtttataaagtctgcaagtagatattcagacccctttgaggccttcgtcggaaacgggatttcttcatattatgctagacagaagaattctcagtaacttccttctgttgcgtgtattcaactcacagagttgaacgatcctttacacagagcagacttgaaacactctttttgtggaatttgcaagtggagatttcagccgctttgaggtcaatggtagaataggaaatatcttcctatagaaactagacagaatgattctcagaaactcctttgtgatgtgtgcattcaactcacagagtttaacctttcttttcatagagcagttaggaaacactctgtttctaaagtctgcaagtggatattcagacatctttggggccttcgttggaaacgggatttcttcatgttctgctagacagaagaattctcagtaactttccttgtgttgtgtgtgttcaactcacagagttgaacgatcctttacacagagcagacttgtcacactctttttgtggaatttgcaagtggagatttcagccgctttgaagtcaaaggtagaaaaggaaatatcttcctataaaaactagacagaatgattctcagaaactcctttgtgatgtgtgtgttcaactcacagagttcaacctttcttttcatagagcagttagtaaacactctgtttataaagtctgcaagtggatattcagacccctttgaggccttcgttggaaacgggatttcttcttattatgctagacagaagaattctcagaatcttccttgtgttgtgtgtattcaactcacagatttgaacgatggtttacacagagcagatttgaaacactctttttgtggaatttgcaagtggagatttcagccgctttgaggtcaatggtagaaaaggaaatatcttcgtataaaaactagacagaacgatcctcagaaactcctttgtgatgtgtgcgttcaactcacagagtttaacttttcttttcatagagccgttaggaaacactctgtttgtaaagtctgcaagtggatattcagacctctttgaggccttcgttggaaacgggatttcttcctattctgctagacagaagaattctcagaaacttcccctgtgttgtgtgaattcaactcacagagttgaacgatcctttacacagagcagacttgaaacactctttttgtggaatttgcaagtggagatttcagccgctttgaggtcaatggtagaatagggaatatcttcctatagaaactagacagaatgattctgagaaactcctttgtgatgtgtgcgttcaactcacagagttcaacctttcttttcctagagcagttgggaaacactctgtttgtaaagtctgcaagtggatattcagacttctttgaggccttcgttggaagcgggatttcttcatattctgccatacagaagaattctcagtaacttcattgtgttgtctgtattcaactcacagagttcaacgatcctttacacagagcagacttgaaacactctttttctggaatttgcaagtggagatttcagccgctttgaggtcaatggtagaaaaagaaatatcttcctataaaaactagacagaatcattcccacaaactgcgttgtgatgtgttcgttcaactcacagagtttaacctttctgttcatagagcagttaggaaacactctgtttgtaaagtctgtaagtggatattctgacatcctgtggccttcgttggaaacgggatttcttcatattctgctagacagaagaattctcagtaacttccttgtgttgtgtgtattcaactcacagagttgaacaatcctttacacagagcggacttgaaacactctttttgtggaatttgcaagtggagattttagccgatttgaggtcaatggtagaataggaaatatcttcctatagaaactagacagaatgattctcagaaactcctttgtgatgtgtgcgttcaactcacagagtttaacctttcttttcatagagcagttaggaaacactctgtttgtaaagtctgtaagtggatattcagacctctttgaggccttcgttggaaacgggatttcttcatattgtgctagacacaagaattctcagtaacttccttgtgttgtgtggattcaactcacagagttgaacgatcctttacacagagcagacttgaaacactctttttgtggaatttgcaagtggagatttcagccgctttgggttcaatggtagaataggaaatatcttcctatagaaactagacagaatcattcccacaaactgcgttgtgatgggttcgttcaactcacagagtttaacctttccgttcatagagcagttaggaaacacactgtttgtaaagtctgtaagtggatattctgacatcttgtggccttcgttggaaacgggatttcttcatattctgctagacagaagaattctcagtaactttccttgtgttgtgtgtattcaactcacagagttgaacgatcctttacagagagcagacttgaaacactctttttgtggaatttgcaagtggagatttcagccactttgaggtcaatggtagaaaaggaaatatcttcgtataaagactagacagattgattctcagaaactcctttttgatgtgtgtcttcaactcacagagtttaaactttcttttcatagagcagttaggaaacactctgtttgtatactctgcaagtggatattcagacctctttgaggccttctttggaaaagggatttcttcatattgtgctagacagaagaattctcagtaactttccttgtgttgtgtgtattcaactcacagagttgaacgatcctttacacagagcggacttgaaacactctttttgtggaatttgcaagtggagatttaagccgcgttgaggtcaatggtagaaaaggaaatatcttcgtataaaaactagacagaatgattctccgaaactcctttgtgatgtgtgcgttcaactcacagagtttaacctttctgttcatagagctgttaggaaacactctgtttgtaaagtctgcaagtggatattcagacctccttgaggccttcgttggaaacgggatttcttcatattctgctagacagaagaattctcagtaacttccttgtgttgtgtgtattcaactcacagagttgaactgatcctttacacagagcagacttgaaacactctttttgtggaatttgcaagtggagatttcagccgctttgaggtcagtagtagaaaaggaaatatcttcgtagaaaaactagacagaatgattctcagaaactcctttgtgatgtgggcgttcaactcacagagtttaacctttcttttcatagagcagttaggaaacactctgtttgtaaagtctgcaagtggatacttggacttctttgaggccttcgttggaaacgggtttttttcatgtaaggctagacagatgaattctcagtaacttccttgtgttgtgtgtattcaactcacagagttgaacgatcctttacacagagcagatttgaaacactgtttttctggaatttgcaagtggagatttcagccgctttgaggtcaatggtagaaaaggaaatatcttcgtataaaaactagacagaatgattctcagaaactcctttgtgatgtgtgcgttcaactcacagagtttaacctttcttttcatagagcagttaggaaacactctgtttgtaaagtctgcaagtggatattcagacatctttgaggctttcgttggaaacgggatttcttcatattctgctagacagcagaattctcagtaacttccttgtgttgtgtgtattcaactaacagagttgaacgatcctttacacagagcagacttgaaacactctttttgtggaatttgcaagtggagatttcagccgctttgagttcaatggtagaataggaaatatcttcctatagaaactagacagaatgattctcagaaaatcctttttgatgtgtgcgttcaactcacagagtttaacttttcttttcatagagcagttaggaaacactctgtttgtaaagtctgcaagtggatattcagacctctttgaggccttcgttggaaacgttatttcttcatattatgctagacagaagaattctcagtaactgccttgtgttgtgtgtattcaactcacagagttgaacgatcctttacacagagcagacttgaaacactccttttgtggaatttgcaagtggagatttcagccgctttgaagtcaatggtagaataggaaatatcttcctatagaaactagacagaatgattctcataaactcctttgtgatgtgtgcgttcaactcacagagtttaacctttcttttcatagagcatttaggaaacactctgtttgtaaagtctgcaagtggatattcagacctctttgaggccttcgttgaaaacgggatttcttcatattctgctagacagaagaattctcagaaacttccttgtgttgtgtgttttcaactcacagagttgaacgatcctttacacagagcagacttgaaacactccttttgtggaatttgcaagtggagatttcagccgctttgaggtcaatggtagaataggaaatatcttcctatagaaggtagacagaatgattctcataaactcctttgtgatgtgtgcgttcaactcacagagtttaacctttcttttcatagagcagttaggaaacactctgtttgtaaagtatgcaagtggatattcagacctctttgaggccttcgttggaaacgggatttcttcatattatgctagacagaagaattctcagtaacttccttgtgttgtgtgtattcaactcacagagttgaacgatcctttacacagagcagacttgaaacactctttttgtgaaatttgcaagtggagatttcagccgctttgaggtcaatggtagaaaagggaatatcttcgtatagaaactagacagaatgattctcagaaactcctttgtgatgtgtgcgttcgactcacagagttgaacctttcttttaatagagcagttgggaaacactctgtttgtaaagtctgcaagtggatattcagacttctttgaggccttcgttggaagcgggatttcttcatattctgctagacagaagaattctcagtaacttccttgtgttgtgtgtattcaactgacagagttgaacgatcctttacacagagcagacttgaaacactctttttggggaatttgcaagtggagatttcagccgctatggggtcaatggtagaataggaaatatcttcctatagaaactagacagaatgattctcagaaactcctttgtgatgtgtgcgttcaattcacagagtttaacttttcttttcatagagcagttaggaaacactctgtttgtaaagtctgcaagtgaatattcagacctctttgaggccttcgttggaaacgggatttcttcatattatgctagacagaagaattctcagtaacttccttgtgttgtgtgtattcaattcacagagttgaacgatcctttacagagagcaggcttgaaacactctttttgtggaatttgcaagtggagatttcatccgctttgaggtcaatggtagaataggaaatatcttcctatagaaacttgacagaatgattctcagaaactcctttgtgatgtgtgcgttcaactcacagagttcaacctttcttttcctagagcagttgggaaacactctgtttgtaaagtctgcaagtggatattcagacatccttgaggctttcgttggaaacgggatttcttcatattctgctatacagaagaattctcagaaacttcctggtgttgtgtgttttcaactcacagagttcaacgatcctttacacagagtagacttgaaacactcttttcgtggaattggcaagtggagatttcagccgctttgaggtcaatggtagaaaaggaaatatcttcgtataaaaactagacagaatgattctcagaaactcctttgtgatgtgtgcgttcaactcacagagtttaacctttcttttcatagagcagttaggaaacactctgtttgtaaactctgcaagtggatatacagacctctttgaggccttcgttggaaacgggatttcttcatactatgctagacagaagaattctcagtaacttccttgtgttgtgtgtattcaactcacagagttgaacgatcctttacacagagcagacttgatacattctttttgtggaatttgcaagtggagatttcagccgctttgaggtcaatggtagaataggaaatatcttcctatagaaactagacagaatgattctcagaaactcctttgtgatgtgtgcgttcaactcacagagtttaacctttcttttcatagagcagttagggaacactctgtttgtaaagtctgcaagtggatattcagacctctttgaggccttcgtaggaaacgggatttcttcatattatgctagacagaagaattctcagtaacttccttgtgttgtgtgtattcaactcacagagttgaacgatcctttacagagagcagacttgaaacactctttttgtggaatttgcaagtggagatttcagccgctttgaggtcaattgtagaaaaggaaatatcttcgtataaagactagacagaatgattctcagaaacttcattgtgatgtgtgcgttcaactcacggagtttaacctttcttttcatagagcagttaggaaacactctgtttgtaaactctgcaagtggatattcagacctctttgaggccttcgttggaaacgggatttcttcatactatgctagacagaagaattctcagtaacttccttgtgttgtgtgtattcaactcacagagttgaacgatcctttacacagagcagacttgaaacactctttttgtggaatttgcaaatggagatttcaagcgctttgaggccaaaggcagaaaaggaaatatcttcgtataaaaactagacagaatgattctcagaaactcctttgtgatgtgtgcgttcaactcacagagtttaacctttcttttcatagagcagttagcaaacactctgtttgtaaagtctgcaagtggatattcagacctctttgaggccttcgttggaaacgggatttcttcatattatgctagacagaagaattctcagtaacctccttgtgttgtgtgtattcaactcacagagttgaacgatggtttacacagagcagaattgaaacactctttttgtggaatttgcaagtggagatttcagccgctttgaggacaatggtagaaaaggaaatatcttcgtataaaaactagacagaatgattctcagaaactcctttgtgatgtgtgcgttcaactcacagagtttaacctttctgttcatagagcaattgggaaacactctgtttgtaaagtctgcaagtggatattcagacctctttgaggccttcgttggaaacgggatttcttcatattctgctagacagaagaattctcagtaacttccttgtgttgtgtgtattcaactcacagagttgaatgatcctttacacagaacagacttgaaacactctttttgtggaatttgcaagtggagatttcagccgctttgaggtcgacggtagaataggaaatatcttcctatagaaactagacagaatgattctcagaaacttcattgtgatttgtgcgttcaactcacagaactttaacctttcttttcatagagcagttaggaaacactctgtttgtaaagtctgcaagtggatattcagacctctttgaggccctcgttggaaactggtttttttcatgtaaggctagacagtagaattctcagaaacttccttgtgttgtgtgttttcaactcccagagttgaacgatgccttacacagagtagacttgaaaaactctttttgtggaatttgcaagtggagatttcaggcgctttgaggtcaatagtagaaaaggaaatatcttcgtataaaaactagacagaatgattctcagaaactcctttgtgatgtgtgtgttcaactcacagagtttaacctttcttttcatagagcagttaggaaacactctgtttgtaaagtctgcaagtggatattcagacctcttcgaggccttcgttggaaacgggtttttttcatataaggctagacagaagaattctcagtaacttccttgtgttgtgtgtattcaactcacagagttgaacgatcctttacacagagcatacttgaaacactcttcttgtggaatttgcaagtggagatttcagccgctttgaggtccatggtagaataggaaatatcttcctatagaaactagacagaatgattctcagaaactcctttgtgatgtgtgcgttcaactcacacagtttaacctttcttttcatagagcagttaggaaacactctgtttgtaaagtctgcaagtggatattcagacctccttgaggtcttcgttggaaacgggatttcttcatattttgctagacagaagaattctcagaaacttccttgtgttgtgtgttttcaactcacagagttcaacgatgctttacacagagtagacttgacacactctttttgtggaatttgcaagaggagatttcagccgctttgaggtcaatggtagaaaaggaaatatcttcgtataaaaactagacagaatgattctcagaaactcctttgtgatgtgtgcgttcaactcacagagttcaacctttcttttcatagagcagttgggaaacactctgtttgtaaagtctgcaagtggatattcagacttctttgaggccttcggtggaagcgggatttcttcatattctgctagacagaagaattctcagtaacttccttgtgttgtgtgtatgcaactcacagagttgaacgatcctttacacagagcagacttgtaacactctttttgtggaatttgcaagtggagatttcagccgctttgaagtcaaaggtagaaaaggaaatatcttcctataaaaactagacagaatgattctcatgaactcctttgtgatgtgtgcgttcaactcacagagtttaacctttcttttcatagagcagttaggaaacactctgtttgtaaagtctgcaagtggatattcagacctccttgaggccttcgttggaaacggtatttcttcatattctgctagacagaagaattctcagtagcttccttgtgttgtgtttattcaactcacagagttgaatgatcctttacacagagcagacttgaaacactctttttgtggaatttgcaagtggagatttcagccgctttgaggtcaatggtagaaaagtaaatatcttcgtataaagactagacagaatgattctcagaaacttcattgtgatgtgtgcgttcaactcacagagtttatcctttcttttcatagagcagttaggaaacactctgtttgtaaactctgcaagtggatattcagacctctttgaggccttcgttggaaacgggatttcttcatactgtgctagacagaagaattctcagtaacttccttgtgttgtgtgtattcaactcacagagttgaacgatcctttacacagagcggacttgaaacactcgttttgtggaatttgcaagtggagatttcagccgtgttgagataaatggtagaaaaggaaatatcttcgtataaaaactagacagaatgattctcagaaactcttttgtgatgtgtgcgttcaactcacagagtttaacctttcttttcatagagcagttaggaaacactctgtttgtaaagtctgcaagtggatattcagacctccttgaggccttcgttggaaacgggatttcttcatattctgctagacagaagaattctcagtaacttccttgtgttgtgtgtattcaactcacagagttgaacgaccctttacacagagcggacttgaaacactctttttgtggaatttgcaagtggagatttcagccgcgttgaggtcaatggtagaaaaggaaatatcttcgtacaaaaactagacagaatcattcccacaaactgcattgtgatgtgttcgttcaactcacagagtttaacctttcttttcatagagcagttaggaaacagtctgtttgaaaattctgtaagtggatattctgacatcttgtggccttcgttggaaacgggatttcttcatattctgctagacagaagaattctcagaatcttccttgtgttgtgtgtattcaactcacagagttgaacgatggtttacacagagcagatttgaaacactcatttggtggaatttgcaagtggagatttcagccgctttgaggtcaatggtagaaaaggaaataccttcgtataacaactagacagaatgattctcataaacttctttgtgatgtgtgcattcaactcacagagtttcacctttcttttcatagagcagttaggaaacactctgtttgtaaagtctgcaagtggatattcagacctccttgaggtcttcgttggaaacgggatttcttcatattctgctagatagaagaattctcagtaacttcccttgtgttgtgtgtattcaactcacggagttgaacgatcgtttacacagagcagacttgaaacactctttttgtggaatttgcaagtggagatttcagccgcgttgaggtcaatggtagaaaaggaaatatcttcgtataaaaactagacagaatgattctgagaaactcctttgtgatgtgtgcgttgaactcacagagtttatcttttcttttcatagagcagttaggaaacactctgtttgtaaagtctgcaagtggatattcagacctccttgaggccttcgttggaaacgggatttcttcatattatgctagacagaataattctcagtaacttccttgtgttgtgtgtattcaactcacagagttgaacgatcctttacacagagcagacttgaaacaatctttttgtggaatttgcaagtggagatttcagccgctttgaggtcaatggtagaataggaaatatcttcctatagaaactagacagaatgattctcagaaactcctttgtgatgtgtgcgttcaactcacagagttcaacctttcttttcatagagcagttgggaaacactctgtttgtaaagtctgcaagtggatattcagacttctttgaggccttcgttggaagcgggatttcttcaaattctgctagacagaagaattctcagaaacttccttgtgttgtgtgtattcaactcacagagttgaacgatcgtttacacagagcagacttgaaacactctttttgtggaatttgcaagtggagatttcagccgctttgaggtcaatggtagaataggaaatatcttcctatagaaactagacagaatgattctcagaaactcctttgtgatgtgtgcgttcaactcacagagtttaacctttcttttcatagagcagttaggaaacactctgtttgtaaagtctgcaagtggatattcagacctccttgaggccttctttggaaacaggatttcttcatattctgctagaaagaagaattctcagtaacttccttgtgttgtgtgtattcaactcacagagctgaacgatcctttacacagagcagacttgtaacactctttttgtggaatttgcaagtggagatttcagccgctttgaagtcaaaggtagaaaaggaaatatcttcctataaaaactagacagaatgattctcagaaactcatttgtgatgtgtgtgttcaactcacagagtttaacctttcttttcatagagcagttagtaaacactctgtttataaagtctgcaagtggatattcagacccctttgaggccttcgttggaaacggcatttcttcatattatgctagacagaagaattctcagaaacttcccttgtgttgtgtttattcaactcacagagtcgaacgatcctttactcagagcagacttgaaacactccatttgtggaatttgcaagtggagatttcagccgctttgaggtcaatggtagaataggaaatatcttcctatggaaactagacagaatgattctaagaaactcctttgagatgtgtgcgttcaactcacagagtttaacctttcttttcatagagcagttaggaaacactctgtttgtaaagtctgcaagtggatattcagacctctttgaggccttccttggaaacgggatttcttcatattatgctagacagaagaattctcagtaacttccttgtgttgtgtgtattcaactgacagagttgaactttcatttagagagagcagatttgaaacactgtttttgtggaatttgcaagtggagatttcaagcgctttggggccaaaggcagaaaaggaaataccttcgtataaaaactagacagaatcattctcagcaaactgctctgtgatgtgtgcgttcaactctcagagtttaacttttcttttcattcagcagtttggaaacactctgtttgtaaagtctgcacgtggataatttgaccacttagaggccttcgttggaaacgggtttttttcatgtaaggctagacagaagaattcccagtaacttccttgtgttgcgtgcattcaactcacagagttgaactttcccttagacagagcagatttgaaacactctatttgtgcaatttgcaagtgtagatttcaagcgctttaaggtcaatggcagaaaaggaaatatcttcgtttcaaaactagacagaatcattcccacaaactgcgttgtgatgtgttcgttcaactcacagagtttaacctttctgttcatagagcagttaggaaacactctgtttgtaaagtctgcaagtggatattcagacctccttgaggccttcgttggaaacgggatttcttcattttctgctagacagaagaattctcagtaacttccttgtgttgtgtgtattcaactcacagagttgaaggatcctttacagagagcaggcttgaaacactctttttgtcgaatttgcaagtggagatttcagccgctttgaggtcaatagtagaaaaggaaatatcttcgtagaaaaactagacagaatgattctcagaaactcctttgtgatgtgtgcgttcaactcacagagtttaaactttcttttcatagagcagttgggaaacactctgtttgtaaagtctgcaagtggatattcagacatccttgaggctttcgttggaaacgggatttcttcatattctgctagaaagaagagttcccactaacttccatgtgttgtgtgtgttcaactcacagagttgaactttcatttacacagagcagatttgaaacactctttttgtggaatttgcaaatggagatttcaagcggtttgaggccaaaggcagaaaaggaaatatcttcgtataaaaactagacagaatcattctgagaaactgctctgcgatgtgtgcgttcaactctcagagtttaacttttcttttcattcagcagtttggaaacactctgtttgtaaagtctgcacgtggataatttgaccacttagaggccttcgttggaaacgggtttttttcatgtaaggctagacagaagaattctcagtaacttccttgtgttgtgtgtattcaactcacacagttgaacgatcctttacacagagcagacttgtaacactctttttgtggaatttgaaagtggagatttcagccgctttgaagtcaaaggtagaaaaggaaatatcttcctataaaaactagacagaatgattctcagaaactcctttgtgatgtgtgcgttcaactcacagagtttaacctttcttttcatagagcagttaggaaacactctgtttgtaaagtctgcaagtggatattcagacctctttgaggccttcgttggaaacgggtttttttcatataaggcttgacagaagaattctcagtaacttccttgtgttgtgtgtattcaagtgacagagttgaacgatcctttacacagagcagacttgaaacactctttttgtggaatttgcaaggggagatttcaagcgctttggggccaaaggcagaaaaggaaatatcttcgtataaaaactagacagaatcattctcagaaactgctctgcgatgtgtgcgttcaactctcagggtttaacttttcttttcattcagcagtttggaagcactctgtttgtaaagtctgcaagtggatattttgacctctttgaggccttcgttggaaacgggtttttttcatgtaagtctagacagaagaattcccagtaacttccttgtgttgtgtgcattcaactcacagagttgaacgttcccttagacacagcagatttgaaacactctatttgtgcaatgtgcaagtgtagatttcaagcgctttaaggtcaatggcagaaaaggaaatatcttcgtttcaaaactagacagaatcattcccacaaactgcgttgtgatgtgttcgttcaactcacagagttttacctttctgttcatagagcagttaggaaacactctgtttgtaaagtctgtaagtggatattctgacatccttgtggccttcgttggaaaagggatttcttcatattctgctagacagaagaattctcagtaacttccttgtgttgtgtgtattcaactcacagagttgaacgatcctttacacagagcagacttgaaacgttctttttgtggaatttgcaagtggagatttcagccgctttgaggtcaatcgtagaataggaaatatcttcctatagaaactagacagaatgattctcagaaactcctttgtgatgtgtgcgttcaactcacagagtttaacctttcttttcatagagcagttaggaaacactctgtttgtaaagtctgcaagtggatattcagacatccttgaggctttcgttggaaacgggatttattcatattctgctagacagaagaattctcagtaacttccttgtgttgtgtgtgttcaactcacagagttgaactttcatttacacagagcagatttgaaacactctttttgtggaatttgcaagtggagatttcagccgctttgaagtcaaatgtagaaaaggaaatatcttcctataaaaactagacagaatgattctcagaaactcctttgtgatgtgtgcgttgaactcacagagtttaaccttccttttcatagagcagttaggaaacactctgtttgtaaagtctgcaagtggatattcagacctctttgaggccttcgttggaaacgggtttttttcatataaggctagacagaagaattcccagtaacttccttgtgttgtgtgtgttcaactcacagagttgaactttcatttacagagagcagatttgaaacactctttttgtggaatttgcaagtggagatttcaagcgctttgaggccaacggcagaaaaggaaatatcttcgtataaaaactagacagaatgattctcagaaacttctttgtgatgtgtgcgttcaactcacagagtttaacctttcttttcatagagcagttaggaaacactctgtttgtaaactctgcaagtggatagtcagacctctttgaggccttcgttggaaacgggatttcttcatactatgctagacagaagaattctcattaacttccttgtgttgtgtgtattcaactcacagagttgaacgatcctttacacagagcggacttgaaacacactttttgtggaatttgcaagtggagatttcagccgcgttgaggtcaatggtagaaaaggaaatatcttcgtataaaaactagacagaatgattctcagaaaatcctttgtgatgtgtgcgttcaactcacagagtttaacttttcctttcatagagcagttaggaaacactctgtttgtaaagtctgcaagtggatattcagacctctttgaggccttcgttggaaacgggatttcttcatattatgctagacagaagaattctcagaaacttccttgtgttgtgtgtattcaactcacagagttgaacgatcctttacacagagcagacttctaacacactttttgtggaatttgcaagtggagatttcagccgctttgaggtcaatggtagaaaaggaaatatcttcgtataaaaactagacagaatgattctcagaaactcctttgtgatgtgtgcgttgaactcacagagtttaacttttcttttcattcagcagtttggatacactctgtttgtaaagtctgcacgtggatattttgagcacttagaggccttcgttggaaacgggtttttttcatgtaaggctaggcagaagaattcccagtaacttccttgtgttgtgtgaattcaactcacagtgttgaacgttcccttagacagagcatatttgaaacactctatttgtgcaatttgcaagtgtagatttcaagcgctttaaggtcaatggcagaaaaggaaatatcttcgtttcaaaactagacagaatcattcccacaaactgcgttgtgatgtgttcgttcaactcacagagtttaacctttctgttcatagagcatttaggaaacactctgtttgtaaagtctgtaagtggatattctgacatcttgtggccttcgttggaaacgggatttcttcatattctgctagacagaagaattctcagtaactttccttgtgttgtgtgtattcaactcacagagttgaacgatcctttacacagagcagacttgaaacactctttttgtggaatttgcaagtggagatttcagccgcgttgaggtcaatgttagaaaaggaaatatcttcgtataaaaactagacagaatgattctcagaaactcctttgtgatgtgtgcgttcaactcacagagtttaacctttcttttcatagagcagttaggaaacactctgtttgtaaactctgcaagtggatattcagacctctttgaggccttcgttggaaacgggatttctccatactgtgctagacagaagaattctcagtaacttccttgtgttgtgtgtattcaactcacagagttgaacgatcctttacacagagcagacttgaaacactctttttgtggaatttgcaggtggagatttcagccgctttgaggtcaatggtagaaaaggaaatatcttcgtataaagactagacagaatgattctcagaaactcctttgtgatgtgtgcgttcagctcacagagtttaacgtttcttttcatagagcagttaggaaacactctgtttgtaaagtctgcaagtggatattcagacctctttgaggccttcgttggaaacgggtttttttcatataaggctagacagaagaattcccagtaacttcccttgtgttgtgtgtgttcaacacacagagttgaactttcatttacacagagcagatttgaaacactctttttgtggaatttgcaagtggagatttcaagcgctttgaggccaaaggcagaaaaggaaatatcttcgtttcaaaactagacagaatcattctcagaaactgctgcgtgatgtgtgcgttcaactctcagactttaacttttcttttcattcagcggtttggaaacactctttttgtaaagtctgcacgtggatattttgaccacttagaggccttcgttggaaacgggtttttttcatgtaaggctagacagaagaattcccagtaacttccttgtgttgtgtgcattcaactcaccaatttgaacgttcccttagacagagcagatttgaaacactctatttgtgcaatttgcaattgtagatttcaagccctttaaggtcaacggcagaaaaggaaatatcttcgtttcaaaactagacagaatcattcccacaaactgcgttgtgatgtgttcgtttaactcacagagtttaacctttcttttcatagagcagttaggaaacagtctgtttgtaaattctgtaagtggatattctgacatcttgtggccttcgttggaaacgggatttcttcatattctgctagacagaagaattctcagaaacttcgttgtgttgtgtgttttcaactcacagagttcaacgatcctttacacagagtagacttgaaacactctttttgtggaattggcagggtggagatttcagccgctttgaggtcaatggtagaaaaggagatatcttcgtataaaaactagacagaatgattctcagaaactcctttgtgatgtgtgctttcaacgcacagagtttaacctttcttttcatagagcagttaggaaacactctgttggtaaagtctgcaagtggatattcagacctccttgaggccttcgttggaaacgggatttcttcctattatgctagacagaagaattctgagtatcttccttgtgttgtgtgtattcaactcacagagttgaacgatcctttacacagagcagacttgaaacactctttttgtggaatttgcaagtggagatttcagccgctttgaggtcaatggtagaaaagggaatatcttcgtatagaaactagacagaattattctcagaaactcctttgtgatgtgtgcgttcaactcacagagtttaacctttcttttcatagagcagttaggaaacactctgtttgtaaagtctgcaagtggatattcagacatctttgaggctttcgttggaaacgggatttcttcatattctgctagacagaagaattcccagtaacttccttgtgttgtgtgtgttcaactcacagagttgaactttcatttacacagagcagatttgaaacactctttttgttgaatttgcaagtggagatttcaagcggtttgaggccaaaggtagaaaaggaaatatcttcgtttcaaaactagacagaatcattctcagaaactgctctgcgatgtgtgcgttgaactctcagagtttaacttttcttttcattcagcagtttggaaacactctgtttgtaaagtctgcacgtggatattttgaccacttagaggccttcgttggaaacgggtttttttcctataaggctagacagaagaattcccagtaacttccttgtgttgtgtgcattcaactcacagagatgaacgttcccttagacagagcagatttgaaacactctatttgtgcaatttgcaagtgtagatttcaagcgctttaaggtcaaaggcagaaaagaaaatatcttcgtttcaaaactagacagaatcattcccacaaactgcgttgtgatgtgttcgttgaactcacagagtttaacctttctgttcatagagcagttaggaaacactctgtttgtaaagtctgtaagtggatattctgacctcttgtggccttcgttggaaacgggatttcttcatattctgctagacagaagaattctcagtaacttccttgtgttgtgtgtattcaactcacagagttgaacgatcccttacacagagcagacttgaaacactctttttgtggaatttgcaagtggagatttcagccgctttgaggtcaatggtagaaaaggaattatcttcgtataaagactagacagaatgattctcagaaacttctttgtgatgtgtgcgttcaactcacagagtttaacctttcttttcatagagcagttaggaaacactctgtatgtaaactctgcaagtggatattcagacctgtttgaggccttcgttggaaacgggatttcttcatactatgctagacagaagaattctcagtaacttccttgtgttgtgtgtattcaactcacagagttgaacgatcctttacacagagcagacttgaaacactctttttgtggagtttgcaattggcgatttcagccgctttgaggtcaatggtagaataggaaatatcttcctatagaaactagacagaatgattctcagaaactcctttgtgatgtgtgcgttcaactcacaaagtttaacctttcttttcatagagcaattaggaaacactctgtttttaaagtctgcaagtggatattcagacctcttagcggccttcgttggaaacgggatttcttcatattatgctagacaaaagaattctcagtaacttccttgtgttgtgtgtattcaactgacagagttgaactttcatttagagagagcagttttgtaacactgtttttgtggaatttgcaagtggagatttcaagcgctttggggccaaaggcagaaaaggaaatatcttcgaataaaaactagacagaatcattctcagaaactgctctgcgatgtgtgcgttcaactctcagagtttaacttttcttttcattcagcagtttggaaacactctgtttgtaaagtctgcacgtggataatttgactacttagaggccttcgttggaaacgggtttttttcatgtaaggctagacagaagaattctcagtaacttccttgagttgtgtgtattcaactcacagagttgcacgatcctttacacagagcagacttgtaacactctttttgtggaatttgcaagtggagatttcagccgctttgaagtcaaaggtagaaaaggaaatatcttcctataacaactagacagaatcattcccacaaactgcgttgtgatgtgttcgttcatctcacagagtttaacctttcttttcatagagcagttaggaaacactctgtttgtaaattctgtgagtggatattctgacatcttgtggccttcgttggaaacgggatttcttcatattctgctagacagaagtattctcagtaacttccttgtgatgtgtgtattcaactcacagagttgaacgatcctttacacagagcagacttgaaacactctttttgtggaatttgcaagtggagatttcagccgctttgagttcaatggtagaataggaaatatcttcctatagaaactagacagaatgattctcagaaactcctttgtgatgtgtgtgttcaactcacagagtttaacctttcttttcatagagcagttagtaaacagtctgtttataaagtctgcaagtggatattcagacccctttgaggccttcgttggaaacgggatttctacatattatgctagacagaagaattctcagtaacttcattgtgttgtgtgtattcaactcacagagttgaacgatcctttacacagagcagacttgaaacactctttttctggaatttgcaagtggagatttcagccgctttgaggtcaatggtagaataggaaatatcttcctatagaaactagacagaatgattctcagaaactcctttgtcatgtgtgcgttcaactcacagagtttaacctttcttttcatagagcagttaggaaacactctgtttctaaagtctgcaagtggatattcagacctctttgaggccttcgttggaaacgggtttttttcatataaggctagagagaagaattcccagtaacttccttgtgttgtgtgtgttcaactcacagagttgaactttcatttacacagagcagatttgaaacactctttttgtggaatttgcaagtggagatttcaagcgctttgaggccaaaggcagaaaaggaaatatcttcgtgtaaaaactagacagaatcattctcagaaactgctctgcgatgtgtgtgttcaactctcagagtttaacttttcttttcattcagcagtttggaagcactctgtttgtaaagtctgcacgtggataatttgaccacttagaggccttcgttggaaacgggtttttttcctgtaaggctagacagaagaattcccagtaacttccttgtgttgtgtacattcaactcacagagttgaacgttcccttagacagagcagatttgaaacactccttttgtgcaattggcaagtggagatttcaagcgctttaaggtcaatggcagaaaaggaaatatcttcgtttcaaaactagacagaatcattcccacaaactgcgttgtgaggtgttcgttcaactcacagagtttaacctttcttttcatagagcagttaggaaacagtctgtttgtaaattctgtaagaggatattctgacatcttgtggccttcgttggaaacgggatttcttcatattctgctagacagaagaattctcagtaacttccttgtgttgtgtgtattcaactcacagagttgaatgatcctttacacagaacagtcttgaaacactctttttgtggaatttgcaagtggagatttcagccgctttgaggtcaatggtagaataggaaatatcttcctatagaaactaggcagaatgattctcagaaacttctttgtgatgtgtgtgttcaactcacacagtttaacctttcttttcatagagcagttaggaaacactgtgtttttaaactctgcaagtggatattcagacctctttgaggccttcgttagaaacgggtttcttcatactgtgctagacagaagaattctcagtaacttccttgtgttgtgtgtattcaactcacagagttgaacgatcctttacacagagcagacttgtaacactctttttgtggaatttgcaagtggagatttcagccgctttgaagtgaaaggtagaaaaggaaatatcttcctataaaaactagacagaatgattctcagaaactcctttgtgatgtgtgcgttcaactcacagagtttaacgtttcttttcatagagcagttaggaaacactctgtttgtaaagtctgcaagtggatattcagacctctttgaggccttcgtaggaaacgggtttttttcatataaggctagacagaagaattcccagtaacttccttgtgttgtgtgtgttcaactcacagagttgaactttgatttacacaggagcagatttgaaacactctttttgtggaatttgcaagtggagatttcaagcgctttgaggccaaaggcagaaaaggaaatatcttcgtataaaaactagacagcatcattctcagaaactgctctgcgatgtgtgcgttcaactctcagagtttaacttttcttttcattcagcagtttggaaacactctgtttgtaaagtctgcacgtggatattttgaccacttagaagccttcgttggaaatgggtttttttcctgtaaggctagacagaagaattcccagtaacttccttgtgttgtgtgcattccactcacagagttgaacgttcccttagacagagcagatttgaaacactctatttgtgtaatttgcaagtgtagatttcaagcgctttaaggtcaacggcagaaaaggaaatatcttcgtttcaaaactagacagaatgattcccacaaactgcgttgtgatgtgttcgtacaactcacagagtttaacctttctgttcatagagcagttaggaaacactctgtttgtaaagtctgtaagtggatattcagacatcttgtggccttcgttggaaacgggatttcttcatattctgctagacagaagaattctcagaatcttccttgtgttgtttgtattcaactcacacagttgaacgatcctttacacagagcagatttgaaacactcatttggtggaatttgtaagtggaggtttcagccgctttgaggtccatggtagaaaaggaaatatcttcgtataacaactagacagaatgattctcaaaaacttctttgtgatgtgtgcgttcaactaacagagtttaacctttcttttcatagagcagttaggaaacactctgtttgtaaactctgcaagtggatattcagacctctttgaggccttcgttggaaacgggatttcttcatactgtgctagacagaagaattctcagtaacttctttgtgttgtgtgtattcaactcacagagttgaacgatcctttacacagagcagacttgaaacactctttttgtggaatttgcatgtggagatttcagccgctttgaggtcaatggtagaataggaaatatcttcctatagaaactagacagaatgattctcagaaactcctttgtgatgtgtgcgttcaactcacagagttcaacctttcttttcatagagcagttgggaaacactctgtttgtaaagtctgcaagtggatattcagagttctttgaggccttcgttggaagcgggatttcttcatattctgctagacagaagaattctcagtaactcccttgtgttgtgtgtattcaactcacagagttgaacgatcctttacacagagcagacttgtaacactctttttgtggaatttgcaagtggagatttcagccactttgaagtcaaaggtagaaaaggaaataacttcctataaaaactagacagaatgattctcagaaactcctttgttatgtgtgcgttcaactcacagagtttaacctttcttttcatagagcagttaggaaacactctgtttgtaaagtctgcaagtggatattcagacctccttgaggccttcgttggaagcgggatttcttcatgttcagctagacagaagaattctcagtaactttccttgtgttgtgtgtattcaactcacagagttgaacgatcctttacacagagcagacttgaaacactctttttgtggaatttgcaagtggagatttcagccgctttgaggtcaaaggtagaaaaggaaactatgttcgtataaagagtagacagaatgattctcagaaactcctttgtgatatgtgcgttcaactcacagagtttaacctttattttcatagagcagttaggaaacactctgtttgtaaagtctgcaaggggatattcagacctctttgaggctttcgttggaaacgggatttcttcatattctgctagacagaagaattctcagtaacttccttgtgtagtgtgcattcaactcacagagttcaacgatcctttacacagagctgattagaaacactttttttgttgaatttgcaagtggagatttcagccgctttgaggtcaatggtagaaaaggaaatatcttcgtataaaaactagacagaatgattctcagaaactcctttgtgatgtgtacgttcaactcacagagtttaacctttcttttcttagagcagttaggaaacactctgtttgtaatgtctgcaagtggatattcagacctctttgaggccttcgttggaaacgggtttttttcatataaggctagacagaagaattctcagaaacttccttgtgttgtgtgttttcaactcacagagttgaacgatcctttacacagagcagacttgaaacacttcttttgtggaatttgcaagtggagatttcatccgctttgaggtcaatggtagaataggaaatatcttcctatagaaagtagacagaatgattctcagaaactcctttgtgctgtgtgcgttcagctcacagagtttaacctttcttttcatagagcagttaggaaacactctgtttgtaaagtctgcaagtggatattcagacctctttgaggccttcgttggaaacgggatttcttcatattctgctagacagaagaattctcagaatcttccttgtgttgtgtgtattcaactcacagagttgaaagaccctttacacagagcggacttgaaacactctttttgtggaatttgcaagtggagatttcagccgcgttgaggtcaatggtagaaaaggaaatatcttcgtataaaaactagacagaatgattctcagaaactcctttgtgatgtgtgcgttcaactcacagagtttaacctttcttttcatagagcagttaggaaacactctgtttgtaaagtctgcaagtggatattcagacctctttgaggccttcgttggaaacgggatttcctcatattatgctagacagaagaattctcagtaacttccttgtgttgtgtgtattcaactcacagagttcaatgatcctttacacagaacagacttgaaacactcttgttgtggaatttgcaagtggagaattcagccgctttgaggtcaacggtagaaaaggaaatatcttcctatagaaactagacagaatgattctcagaaactcctttgtgatgtgtgcgttcaactcacagagtttagcctttcttttcatagagcagttaggaaacactctgtttgtaaagtctgcaagtggatattcagacctctttgaggccttcgttggaaacgggatttcttcatattctgctagacagaagaattctcagtaacttccttgtgttgtgtgtattcaactcacagagttgaacgatcctttacacagagcggacttgaaacactctttttgtggaatttgcaagtggagatttcagccgcattgaggtcaatggtagaaaaggaaatctcttcgtataaaaactagacagaatgattgtcagaaactcctttgtgatgtgtgcgttcaactcacagagtttaacctttcttttcatagagcagttaggaaacactctgtttgtaaagtctgcaagtggatattcagacatctttgaggctttcgttggaaacgggatttcatcatattctgctagacagaagaattctcagaaacttccttgtgttttgtgttttcaactcacggagttgaacgatgctttacacagagtagacttgaaacactctttttgtggaatttgcaattggagatttcagccgctttgaggtcaatggtagaaaaggaaatatcttcgtataaaaactagacagaatgattctcagaaacttctttgtgatgtgtgcgttcaactcacagagtttaacctttcttttcatagagcagttaggaaacactctgtttctaaactctgcaagtggatattcagacctccttgaggccttcgttggaaacgggatttcttcatactatggtagacagaagaattctcagaatcttccttgtgttgtgtgtattcaactcacagagttgaacgatcctttacacagagcagacttgaaacactctttttgtggaatttgcaagtggagatttcagccgctttgaggtcaatggcagaaaaggaaatatcttcgtatgaaaactagacagaatgattctcagaaactcctttgtgatgtgtgcgttcaactcacagagtttaaccttacttttcatagagcagttaggaaacactctgtttgtaaagtctgcaagtggatattcagacctctttgaggccttcgttggaaacgggatttcttcatattctgctagacagaagaattctcagtaacttccttgtgttgtgtgtattcaactcacagagttgaacgatcctttacacagagcagacttgaaacactccttttgtggaatttgcaagtggagatttcagccgctttgaggtcaatagtagaaaaggaaatatcttcgtagaaaaactagacagaatgattctcagaaactcctttgtgatgtgtgcgttcaactcacagagtttaacttttcttttcatagagcagttaggaaacattctgtttgtaaagtctgcaagtggatattcagacctctttgtggccttcgttggaaacgggatttcttcatattctgctagacagaagaattctcagtaacttccttgtgttgtgtgtattcaactgacagagttgaactttcatttagagagagcagatttgaaacactgtttttgtggaatttgcaagtggagatttcaagctctttggggccaaaggcagaaaaggaaatatcttcgtagaaaaactagacagaatcattctcagaaactgctctgcgatgtgtgcgttcaactctcagagtttaacttttcttttcattcagcagtttggaaacactctgtttgtaaagtctgcacgtggataatttgaccaccgagagaccttcgttggaaacgggtttttttcatgtaaggctagacagaagaattcccagtaacttccttgtgttgtgtgcattcaactcacagagttgaacgttcccttagacagagcagatttgaaacactctatttgtgcaatttgcaagtgtagatttcaagatctttaaggtcaacggcagaaaaggaaatatcttcgtttcaaaactagacagaatgattctcataaactcctttgtgatgtgtgcgtttaactcacagagtttaacttttcttttcatagagcagttaggaaacactctgtttgtaaagtctataagtggatattctgacatcttgtggccttcgttggaaacgggatttcttcatattctgctagacagaataattctcagtaaattccttgtgttgtgtgtattcaagtcacagagttgaacgatcctttacagagagcagacttgaaacactctttttgtggaatttgcaagtggagatttcagccgctttgaggtcaatagtcgaaaaggaaatatcttcgtagaaaaactagaaagaatgattctcagaaaatcttttgtgatgtgtgcgttcaactcacagagttttacttttcttctcatagagcagttaggaaacactctgtttgtaaagtctgcaagtggatattcagacctctttgaggccttcgttggaaacgggatttcttcatattatgctagacagaataattctcagtaacttccttgtgttgtgtttattcaactcacagagttgaatgatcctttacacagagcagacttgaaacactctttttgtggaatttgcaagtggagatatcagccgctttgaagtcaatggtagaaaagtaaatatcttcgtataaagactagacagaatgattctcataaactcctttgtgatgtgtgcgttcaactcacagtagtttaacctttcttttcatagagcagttaggaaacactctgtttgtaaagtctgcatgtggatattcagacctctttgaggccttccttggaaacgggatttcttcatattctgctagacagaataattctcagtaacttccttgtgttgtgtgtattcaactcacagagttgaacgatcctttacagagagcagacttgaaaaactctttttgtgggatttgcaagtggagatttcagccgctttgagctcaatggtagaataggaaatatcttcctaaagaaactagacagaaagattctcagaaactcctttgtgatgtgtgcgttcaactcacagagtttaacctttcttttcatagagcagttaggaaacactctgtttgtaaagtctgcaagtggatattcagacctgtttgaggccttcgttggaaacgggtttttttcatataaggctagacagaagaattctcagtaacttccttctgttgtgtgtattcaactcacagaattgaacgatcctttacacagagcagacttgacacactctttttgtggaatgtgcaagtggagatttcagccgctttgaggtcaatggtagaaaaggaaaaatcttcgtatagaaacaagacagaatgattctcataaactcctttgtgatgtgtgcgttcaactcacagagtttaacctttcttttcatagagcagttaggaaacactctgtttgtaaagtctgcaagtggatattcagacctccttgagaccttcgttggaaacgggatttcttcatattctgctagacagaagaattctcagtaacttccttgtgttgtgtgtattgaactcgcagagttgaacgatcctttacacagagcagacttgaaacactctttttgtggaattttcaagtgcagatttcagccgctttgaggtcaatagtagaaaaggaaatatcttcgtagaaaaactagacagaatgattctcagaaactcctttatgatgtgtgcattcaactcacagaggttaacctttcttttcatagagcagttaggaaacactctttttgtaaagtctgcaagtggataatcagacctctttgaggccttcgttggaaacgggatttcttcatactatgctagacagaagaattctcagtaacttccctgtgttgtgtgtattcaactgacagagttgaactttcttttagagagagcagatttgaaacactgtttttgtggaatttgcaactggagatttcaagcgctttggcgccaaaggcagaaaaggaaatatcttcgtataaaaactagacagaatcattctcagaaactgctctgcgatgtgtgcgttcaactctcagagttaaacttttcttttcattcagcagtgtggaaacactctgtttgtaaagtctgcacgtggatattttgaccgcttagaggccttcgttggaaacggttttttttcatgtaaggctagacagaagaattcccagtaacttccttgtgttgtgtgcattcaactcacagagttgaacgttcccttagacagagcagatttgaaacactctatttgtgcaatttgcaagtgtagatttcaagcgcgttaaggtcaacggcagaaaaggaaatatcttcgtttcaaaactagacagaatcattcccacaaactgcgttgtgatgtgttcgttcaactcacagagtttaacctttctgttcatagagcagttaggaaacactctgtttgtaaagtctgtaagtggatattctgaaatcttgtggccttcgttttaaacgggatttcttcatattctgctagacagaagatttctcagtaacttccttgtgttgtgtgtattcaactcacagagttgaatgatcctttacacagaacagtcttgaaacactctttttgtggaatttgcaagtggagatttcagccgctttggggtcaatggtagaataggaaataccttcctatagaaactagacagaatgattctcagaaaatcttttgtgatgtgtgcgttcaactaacaaagtttaacttttcttctcatagagcagttacgaaacactctgtttgtaaagtctgcaagtgtatattcagacctctttgaggccttcgttggaaacgggatttcttcatattatgctagacagaataattctcagtaacttccttgtgttgtgtgtatttaactcacagagttgaaggatcctttacagagagcaggcttgaaacactctttttgtcgaatttgcaagtggagatttcagccgctttgaggtcaatggtagaataggaaatatgttcttatagaaactagacagaatgattctcagaaactcctttgtgatgtgtgcgttcaactcagagtttaacctttcttttcatagagcagttaggaaacactctgtttgtaaagtctgcaagtggatattcagacctctttgaggccttcgttggaaacgggatttcttcatattatgctagacagaagaattctcagtaacttccttgtgttgtgtttattcaactcacagagttgaatgatcctttacacagagcagacttgaaacactctttttttggaatttgcaagtggagatttcagccgctttgaagtcaatggtagaaaagtaaatatcttcgtataaagactagacagaatgattctcagaaacttctttgtgatgtgtgcgttcaactcacagagtttaacctttcttttcatagagcagttaggaaacactctgtttgtaaagtctgcaagtggatattcagtcctccttgaggccttcgttggaagcgggatttcttcatgttctgctagacagaagaattctcagtaacttccttgtgttgtgtgtattcaactctcagagttcaacgatcctttacacagagcagacttgaagcactctttttgtggaatttgcaagtggagattttagccgctttgaggtcaatggtagaataggaaatatcttcctatagaaactagacagaatgattctcagaaactcctttgtgatgtgtgcgttcaactcacagagtttaacttttcttttcatagagcagttaggaaacactctgtttgtaaagtctgcaagtggatattcagacctctttgaagccttcgttggaaacgggatttcttcatattctgctagacagaagaattcccagtaacttccttgtgttgtgtgtgttcaactcacagagttgaactttgatttacacagaacagatttgaaacactctttttgtggaatttgcaagtggagatttcaagcgctttgaggccaaaggcagaaaaggaaatatcttcgtataaaaactagacagaatcattctgagaaactgctctgtgatttgtgcgttcaactctcagagtttaacttttcttttcattcagcagtttggaaactctctctttgtaaagtctgcacgtgcatattttgaacacttagaggccttcgttggaaacgggtttttttcatgtaaggctagacagaagaattcccagtaacttccttgtgttgtgtgcattcaactcacagagatgaacgttcccttagacagagcagatttgaaacactctatttgtgcaatttgcaagtgtagatttcaagcgctttaaggtcaatgacagaaaaggaaatatcttcgtttcaaaactagacagaatcattcccacaaactgcgttttgatgtgttcgttcaactcacagaatttaacctttcttttcatagagcagttaggaaacactctgtttgtaaattctgtaagtggatattctgaaatcttgcagccttcgttggaaacgggctttcttcatattctgctagacagaagaattctcagtaacttccttgtgttgtgtgtattcaactcacagagttgaacgatcctttacacagagcagacttgaaacactctttttgtggaatttgcaagtggagatttcagccgctttgaggtcaatggtagaaatggaaatatcttcgtataaagactagacagaatgattctcagaaactcctttgtgatgcgtgcgttcaactcacagagtttaacctttcttttcatagagcagttaggaaacactctgtttgtaaagtctgcaattggatattcagacctctattaggccttcgttggaaacgggatttcttcatattctgctagacagaagaattctcagtaacttccttgtgttgcgtgttttcaaatcacagagctgaacgatcctttacaaagagcagacttgaaacactctttttgtggaatttgcaagtggagatttcagccgctttgaggtcaatagtagaataggaaatatcttcctatagaaactagacagaatgattctcagaaactcctttgtgatgtgtgcgttcaactcacagagtttaacttttcttttattagggcagttaggaaacactctgtttgtaaagtcttcaagtggatattcagacctctttgaggccttcgttggaaacgggatttcttcatattctgctagacagaagaattctcagtaacttccttgtgttgtgtgtattcaactcacagagttgaacgatcctttacagagagcagacttgaaaaactctttttgtggaatttgcaagtggagatttcagccgctttgaggtcaatggtagaataggaaatatcttcctatagaaactagacagaatgattctcagaaactcctttgtgatgtgtgcgttcaactcacatagttcaacctttcttttcatagagtagttgggaaacactctgtttgtaaagtctgcaagtggatattcagacttctttgaggccttcgttggaagcgggatttcttcatattctgctagacagaagaattctcagaaacttccttgtgttgtgtgttttcaactcacagagttgaacgaccctttacacagagcagaattgaaacactctctttgtggaatttgcaagtggagatttcagccgctttgaggtcaatggtagaaaaggaaatatcttcgtataaaaactagacagaatgattctcagaaactcctttgtgatgtgtgcgttcaactcacagagtttaacctttcttttcatagagcagttgggaaacactctgttcgtaaactctgcaagtggatattcagacctctttgaggccttcgttggaaacgggatttcttcatattctgctagacagaagaattctcagaaacttccttgtgttgtgtgtattcaactcacacagttgaacgatcctttacacagagcagacttgaaacactctttttgtggaatttgcaagtggagatttcagccgctttgaggtcaatggtagaataggaaatatcttcctatagaaactagacagaatgattctcagaaactcctttgtgatgtgtgcgttcaactcacagagtttaacctttcttttcatagagcagttaggaaacactctgtttataatgtctgcaagtggatattcagacctctttgaggccttcgttggaaacgggatttcttcatattatgctagacagaagaattctcagtaacttccttgtgttgtgtgtattcaacccacagagttgaacgatcctttacacagagcatacttggaacactcttcttgtggaatttgcaagtggagatttcagccgctttgagatcaatggtagaataggaaatatcttcgtataaaaactagacagaatgattctcagaaaatcctttgtgatgtgtgtgttcaactcacagcagtttaacctttcttttcatagagcagttagtaaacactctgtttataaagtctgcaagtggatattcagacacctttgaggacttcgttggaaatgggatttcttcatattatgctagacagaagaattctcagtaacttccttgtgttgtgtgtattcaactcacagacttgaacgatcctttacacagagcagacttgaaacactctttttgtggaatttgcaagtggagatttcagccgctttgaggtcaatggtagaaaaggtaactatcttcgtataaagactagacagaatgtttctcagaaactcctttgtgatgtgtgcgttcaactcacagagtttaacctttcttttcatagagtagttaggaaacactctgtttgtaaagtctgcaagtggatattgagacctctttgaggccttcgttggaaacgggatttcttcatattctgctagacagaagaattctcagtaacttccttgtgttgtgtgtattcaactcacagagttgaacgatcctttacacagagcagacttggaacactgtttttgtggaatttgcaagtggagatttcagccgcgttgaggtcaatggtagaaaaggaaatatcttcgtataaaaactagacagaatgattctcagaaactcctttgtgatgtgtgcgttcaactcacagagttgaagttttcttttcttagagcagttaggaaacactctgtttgtaaagtctgcaagtggatattcagacctctttgaggccttcgttggaaacggggtttcttcatattctgctagacagaagaattctcagtaacttccttgtgttgtgtgtattcaactcacagagttgaacgatcctttacacagagcagacttgaaacactctttttgtgggatttgcaagtggagatttcagccgctttgaggtcaatggtagaaaaggaaatatcttcgtataaagactagacagaatgattctcagaaactcctttgtgatgtgtgtgttcaactcacagagtttatcctttcttttcatagagcagttaggaaacactctgtttgtaaagtctgcaagtggatattcagacatccttggggctttcgttggaaacgggatttcttcatattctgctagaaagaagaattctcagtaacttccttgtgttgtgtgtattcaactcacagagttgaacgatcctttacacagagcagacttcaaacactctttttgtggaatttgcaagtggagatttcagccgctttgaggtcaatggtagaaaaggaaactatcttcatataaagactagacagaatgattctcagaaactcttttgtgatgtgtgcattcaactcacagagtttaacctttcttttcatagagcagttaggaaacactctgtttgtaaagtctgcaagtggatattcagacctctttgaggccttcgttggaaacgggatttcttcatattatgctagaaagaagaattctcagtaacttccttgtgttgtgtgtattcaactcacagagttgaacgatcctttacacagagcagacttgaaacactctttttgtggaatttgcaattggagatttcagcccctttgaggtcaatggtagaataggaaatatcttcctatagaaactagacagaatgattctcagaaactcctttgtgatgggtgtgttcaactcacagagtttaacctttcttttcatagagcagttagtaaacactctgtttataaattctgcatgtggatattcagatccctttgaggccttcgttggaaacgggatttcttcatattatgctagacagaagaattctcagaaacttccttgtgttgtgtgttttcaactcacagagttgaacgatcctttacacagagcagacttgaaacactctttttgtggaatttgcaagtggagatttcagccgctttgaggtcaatggtagaataggaaatatcttcgtataaaaactagacagaatgattctcagaaactcctttgtgatgtgtgcgttcaactcacagagtttaacctttctcttcatagagcagttaggaaacactctgtttgtaaagtctgcaagtggatattcagacctctttgaggccttcgttggaaacggtatttcttcatattctgctagacagaagaattctcagtaacttccttgtgttgtgtgtattcaactcacagagttgaatgatcctttacacagaacagacttgaatcactcttgttgtggaattttcaagtggagatttcagccgctttgtggtcaacggtagaataggtaatatcttcctatagaaactagacagaatgattctcagaaactcctttgtgatgtgtgcgttcaaatcacagagtttaacctttcttttcatagagcagttaggaaacactctgtttgtaaagtctgcaagtggatattcaaacccctttgaggccttcgttggaaacggtatttcttcatattctgctagacagaagaattctcagtaacttccttgtgttgtgtgtattcaactcacagagttgaacgatcctttacacagagcagaattgaaacactctttttgtggaatttgcaagtggagatttcagccgcgttgaggtcaatggtagaaaaggaaatatcttcgtataaaaactagacagaatgattctcagaaactcctttgtgatgtgtgcattcaactcacagagtttaacctttcttttcatagagcagttaggaaacactctgtttgtaaagtctgcaagtggatattcagacctctttgaggccttcgttggaaatgggatttcttcatattctgctagagagaagaattctcagtaacttcattgtgttgtgtgtattcaactcacagatttcaacgatcctttacacagagcagacttgaaacactctttttctggaatttgcaagtggagatttcagccgctttgaggtcaatggtaggataggaaatatcttcctatagaaactagacagaatgattctcagaaactcctttgtgatgtgtgcgttcaactcacagagtttaacctttcttttcatagagcagttaggaaacactctgtttgtgaagtctgcaagtggatattcagacctctttgaggccttcgttggaaacgggtttttttcatataaggctagacagaagaattctcagaaacttccttgtgttgtgtgtattcaactcacagagttgaacgatcctttacacagggcagacttgaaacactctttttgtggaatttgcaaatggaaatttcagccgctttgaggtcaatggtagaaaaggaaatatcttcgtataaaaactagacagaatgattctcagaaactactttgtgctgtgtgcgttcagctcacagagtttaacctttcttttcatagagcagttaggaaacactctgtttgtaaagtctgcaagtggatattcagacatctttgtggctttcgttggaaacgggatttcttcatattctgctagacagaagaattctcagaaacttccttgtgttgtgtgttttcaactcacagagttcaacgatccattacacagagtagacttgaaacactctttttgtggaattggcaagtggagatttcagccgctttgaggtcaatggtagaaaaggaaatatgcttcgtataaaaactagacagaacgattctcagaaactcctttgtgatgtgtgcgttcaactcacagagtttaacctttcttttcatagagcagttaggaaacactctgtttgtaaagtctgcaagtggatattcagacctctttgaggccttcattggaaacgggatttcttcctattctgctagacagaagaattctcagtaacttccttgtgttgtgtgtattcaactcacagagttggacgatcctttacacagagcagacttgaaacactctttttgtggaatttgcaagtggaggtttcagccgctttgaggtcagtagtagaaaaggaaatatcttcgtagaaaaactagacagaatgattctcagaaactcctttgtgatgtgtgcgttcagctcacagagtttaacctttcttttcatagagcagttaggaaacactctgtttgaaaagtctgcaagtggatattctgacctccttcagggcttcgttggaaatgggatttcttcatattatgatggacagaagaattctcagtaacttccttgtagtgtgtgtattcaactcacagagttaaacgatcctttacacagagcagacttgaaacactcttgttgtggaatttccaagtggagatttcagccgctttgaggtcaatggtagaataggaaatatcttcctatagaaactagacagaaggattctcagaaactcctttgtgatgtgtgcgttcatctcacaaagtttaacctttctttccatagagcagttaggaaacactctgtttgtaaagtctgcaagtagatattcagacctttttcaggccttcgttggaaacgggatttcttcatactctgctagacagaagaattctcagaaacttccttgtgttgtgtgttttcaactcacagagttgaacgatgctttacacagagtagacctgaaacactctttttgtgtaatttgcaagtggagatttcagccgctttgaggtcaatggtagaaaagggaatatcttcgtataaaaactagacagaatgattctcagaaactcctttgtgatgtgtgtgttcaactcacagagtttaacctttcttttcatagagcagttaggaaacactctgtttgtaatgtctgcacgtggatatttggacttctttgaggccttcgttggaaacgggtttttttcatttaaggctagacagaagaattctcagaaacttccttgtgttgtgtgtattcaactcacagagttgaacgatcctttacacagagcagacttgaaacactctttttgtggaatttgcaagtggagatttcagccgctttgagttcaatggtagaataggaaatatcttcctatagaagctagacagaatgattctcagaaacttctttgtgatgtgtgcgttcaactcacagagttcaacctttcttttcatagagcagttaggaaacactctgtttgtaaactctgcaagtggatattcagacctgtttgaggccttcgttggaaacgggatttcttcatactatgctagacagaagaattctcagtaacttccttgtgttgtgtgtattcaactcacagagttgaacgatcctttacacagagcagactagaaacattctttttgtggaatttgcaagaggagatttcagccgctttgaggtcaatggtagaataggaaatatcttcctatagaaactagacagaacgattctcagaaactcctttgtgatgtgtgcgttcaactcacagagtttaacctttcttttcatacagcagttaggaaacactctgtttgtaaagtctgcaagtggatattcagacctctttgaggccttcgttggaaacgggatttcttcctattctgctagacagaataattctcagtaacttccttgtgttgtgtgtattcaactcacagagttgaacgatcctttacacagagcagacttgaaactctctttttgtggaatttgcaagtggagatttcagccgctttgaggtcaatagtagaaaaggaaatatcttcgtagaaaaactagacagaatgattctcagaaactcctttgtgatgtgtgtgttcaactcacagagtttaacctttcttttcatagagcagttagtaaacactctgtttataaagtctgcaagtggatattcagaaccctttgaggccttcgttggaaacgggatttcttcatattatgctagacagaagaattcccagtaacttccttgtgttgtgtgtgttcaattcacagagttgaactttgatttacacagagcagatttgaaacactctttttgtggaatttgcaagtggagatttcaagcgctttgaggccaaaggcagaaaaggaaatatcttcgtataaaaactatacagaatcattctcagaaactgctgcgtgatgtgtgtgttcaaccctcagagtttaactttccttttcattcagcggtttggaaacactctgtttgtaaagtctgcacgtggatattttgaccacttagaggtcttcgttggaaacgggtttttttcatgtaaggctagacagaagaattcctagtaacttccttgtgttgtgtacattcaactcacagagttgaacgttcccttagacagagcagatttgaaacactctttttgtgcaattggcaagtggtgatttcagccgctttgaggtcaatggtagaaagggaaatatcttcgtattaaaactagacagaatgattctcagaaactcctttgtgatgtgtgcgttcaactcacagagtttaacctttctgttcatagagcagttaggaaacactctgtttgtaaagtctgcaagtggatattcagacctccttgaggccttcgttggaaacgggatttcttcatgttctgctagacagaagaattctcagtaacttccttgtgttgtgtgtattcaactcacagagttgaacgatcctttacacagagcagacttgaaacactctttttgtggaattggcaagtggagatttcagccgctttgaggtcaatggtagaaaaggaaatatcttcgtataaagactagacagaatgattctcagaaacttcattgtgatgtgtgcgttcaactcacagagtttaacctttcttttcatagagcagttaggaaacactctgtttgtaaagtctgcaagtggatattcagacctctttgaggccttcgttggaaacgggtttttttcataaaaggctagacagaagaattctcagtaacttccttgtgttgtgtgtattcaactgacagagttgaactttcatttagagagagcagatttgaaacactgtttttgtggaatttgcaagtggagatttcaagcgctttggagccaaaggcagaaaaggaaatatcttcgtataaaaactagacagaatcattctcagaaactgctctgcgatgtgtgcgttcaactctcagagtttaacttttcttttcattcagcagtttggaaacactctgttggtaaagtctgcacgtggatattttgaccacttagaggccttcgttggaaacgggattttttcctgtaaggctagacagaagaattcccagtaacttccttgtgttgtgtgcattcaactcacagagttgaacgttcccttagacagagcagatttgaaacattctatttgtgtaatttgaaagtgtagatttcaagcgctttaaggtcaatggcagaaaaggaaatatcttcgtttcaaaactagacagaatcattcccacaaactgcgttgtcatgtgttcgttcaactcacagagtttaacctttcttttcatagagcagttaggaaacagtctgtttgtaaattctgtaagtggatattctgacatcttgtggccttcgttggaaacgggatttcttcatattctgctagacagaagaattctcagtaacttcttggtgttgtgtgtattcaactcacagagttgaacgatgctttacacagagcagacttgaatcactcgttttgtggaatttgcaagtggagatttcagccgctttgaggccaaaggcagaaaaggaaatatcttcgtataaaaactagacagaatgattctcagaaactcctttgtgatgtgtgcgttcaactcacagagtttaacctttcttttcatagagcagttaggaaacactctgcttgtaaagtctgcaagtgcatattcagccctctttgaggccttcgttggaaacgggtttttttcatataaggctagacagaagaattctcagtaacttccttgtgtcgtgtgtattcaactcacagagttgaatgatcctttacaaagagcagacttgaaacactctttttgtggaatttgcaagtggagatttcagccgctttgaggtcagtggtagaataggaaatatcttcgtataaaaactagacagaatgattctcagaaactcctttgtgatgtgtgcgttcaactcacagagtttaacctttcttttcatagagcagttaggaaacactctgtttataaagtctgcaagtggatattcagacctctttgaggccttcgttggaaacgggatttcttgatactatgctagacagaagaattctcagtaacttccttgtgttgtgtgtattcaactgacagagttgaactttcatttagacagaggagatttgaaacactctttttgtggaatttgcaagtggagatttcaagcgctttgattccaaaggcagaaaaggaaatatcttcgtataaaaactagacagaatcattctcagaaactgctctgcgatgtgtgagttcaactctcagagtttaacttttcttttcattcagcagtttggaaacactctgtttgtaaagtctgcacgtggataacttgaccacttagaggccttcgttggaaacgggtttttttcttgtaaggctagacagaagaattcccaggaacttccttgtgttgtgtacattcaactcacagagttgaacgttcccttagacagagcagatttgaaacactctttttgtgcaattggcaagtggtgatttcagccgctttgaggtcaatggtagaaaaggaaatatcttcttataaaaactagacagaatcattcccaaaaactgcgttgtgatgtgttccttcatctcacagagtttaacctttcttttcatagagcagttaggaaacagtctgtttgtaaattctgtaagtggatattctgacatcttgtggccttcgttggaaacgggatttcttcatattctgctagacagaagaattctcagtaacttccttgtgttgtgtgcattcaactcacagagttgaacgatactttacacagggcagacttaaaacactctttttgtggaatttgcaagcggagatttcagcctctttgaggttaatggtagaaaatgaaatatcttcgtatagaaactagacagaatgattctcataaactcctttgtgatgtgtgccttcaactcacagagtttaacctttcttttcatagagcagttagtaaacactctgtttataaagtctgcaagtggatattcagacccctttgaggccttcgttggaaacgggatttcttcatattatgctagacagaagaattctcagtaacttccttgtgttgtgtgtattcaactcgcagagttgaacgatcctttacacagagcagacttgaaacactctttttgtggaatttgcaagtggagatttcagccgctttgggttgaatggtagaataggaaatatcttcctatagaaactagacagagtgattctcagaaactcctttgtgatgtctgcgttcaactcacagagtttaacctttcttttcatagagcagttaggaaacactctgtttgtaaagtctgcaagtggatattcagacctccttgaggccttcgttggaaacggtatttcttcatattctgctatacagaagaattcccagtaacttccttgtgttgtgtgtgttcaactctgtgagttgaactttcatttacacagagcagattggaaacactctttttgtggaatttgcaagtggagatttcaagcgctttgaggccaaaggcagaaaaggaaatatccttcgtataaaaactagacagaatcattctcagaaactgctctgcgatgtgtgcgttcaaccctcagagtttaacttttcttttcattcagcagtttggaatcactctgtttgtaaagtctgcacgtggatattttgaccacttagaggccttcgttggaaactggtttttttcctgtaaggctagacagaagaattcccagtaaattccatgtgttgtgtgcattcaactcacagagttgaacgttcccttagacagagcagatttgaaacactctatttgtgcaatttgcaagtgtagatttcaagcgctttaaaggtcaatggcagaaaagggaatatcttcgtttcaaaactagacagaatcattcccacaaactgagttgtgatgtgttcgttcaactcacagagtttaacctttctgttcatagagcagtgaggaaacactctgtttgtaaagtctgtaagtggatattctgacatcttgtggccttcgttggaaacaggatttcttcatattctgctagacagaataattctcagtaacttccttgtgttgtgtgtattcaactgtcagagttgaacgatcctttacagagagcagacttgaaacactctttttgtggaatttgcaagtggagatttcagccgctttgaggtcaatggtagaataggaaatatcttcctatagaaactagacagaatgattctcagaaactcctttgtgatgtgtgcgttcaactcacagagtttaacctttctgttcatagagcagttaggaaacactctgtttgtaaagtctgcaagtggatattcagacctccttgaggtcttcgttggaaacgggatttctttatattctgctagacagaagaattctcagtaacttccttgtgttgtgtgtattcaactgacagagttgaactttcatttagagagagctgatttgaaacactgtttttgtggaatttgcaagtggagatttcaagcgctttggggccaaaggcagaaaaggaaatatctttgtataaaaactagacagaatcattctcagaaactgctctgcgatgtgtgcgttcaactctcagagtttaacttttcttttcattcagcagtttggaaacactctttttttaaagtctgcacgtggataatttgaccacttagaggccttcgttggaaacgggtttttttcatgtaaggctagacagaagtattcccagtaacttccttgtgttgtgtgcattcaactcacagagttgaacgttccctaggacagagcaggtttgaaacactctatttgtgcaatttgcaagtgtagatttcaagcgcattaaggtcaatggcagaaaaggaaatatcttcgattcaaaactagacagaatcattcccacaaactgcgttgtgatgtgttcgttcaactcacagagtttaacctttctgttcatagagcagttaggaaacactctgtttatacagtctgcaagtggatattcagacctccttgaggccttcgttggaaacgggatttcttcatattctgctagacagaagaattctcagtaacttccttgtgttgtgtgtattcaactcacacagttgaacgatcctttacacagagcagacttgaaacactctttttgtggaatttgcaagtggagatttcatccgctttgaggtcaatggtagaataggaaatatcttcctatagaaactagacagaatgattctcataaactcctttgtgatgtgtgcgttcaactcacagagtttaacctttcttttcatagagcagttaggaaacactctgtttgtaaagtctgcaagtggatattcagacctctttgagtccttcgtttgaaacgggatttcttcatattctgctagacagaagaattctcagtaacttccttgtgttgtgtgtattcaactcacagatttgaacgatcctttacacagagcagacttgtaacactctttttgtggaattcgcaagtggagatttcagcagctttgaagtcaaaggtagaaaaggaaatatcttcctataaaaactagacagaatgattctcagaaactcctttgggatgtgtgcgttcaactcacagagtttaacctttcttttaatagagcagttaggaaacactctggttataaagtctgcaagtggatattcagacctctttgaggccttcgttggaaacgggatttcttcatattctgctagacagaagaattcccagtaacttccttgtgttgtgtgtgttcaactcacagagttgaactttcatttacacagagcagatttgaaacactctttttgtggaatttgcaagtggagatttcaagcgctttgaggccaaaggcagaaaaggaaatatcttcatttcaaaactagacagaatcattctcagaaactgctctgcgatgtgtgcgttcaactctcagagtttaactttgcttttcattcagcagtttggaaacactctgtttgtaaagtctgcacgtggataatttgaccacttagaggccttcgttggaaacgggtttttttcatgtaaggctagagagaagtattcccaggaacttccttctgttgtgtacattcaactcacagagttgaacgttcccttagacagagcagatttgaaacactctttttgtgcaattggcaagtggtgatttcagccgctttgaggtcaatggtagaaaaggaaatatcttcgtataaaaactagacagaatgattctcagaaacttcattgtgacgtgtgcgttcaagtcacagagtttaacctttcttttcatagagcagttaggaaacactctgtttgtaaagtctgcaagtggatattcagacctctttgaggccttcgttggaaacgggatttcttcatactgtgctagacagaagaattctcagtaacttccttgtgttgtgtgtattcaactcacagagttgaacgatcctttacagagagcagacttgaaacacactttttgtggaatttgcaagtggagatttcagccgctttgaggtcaatggtagaaaaggaaatatcttcgtataaagactagacagaatgattctcagaaactcctttgtgatgtgtgcgttcaacaaacagagtttaacttttcttttcatagagcagttaggaaacactctgtttgtaaagtctgcaagtggatattcagagctctttgaggccttcgttggaaacgggatttcttcatattctgctagacagaagaattctcagtaacttccttgtgttgtgtgtgttcaactcacagagttcaacgatgctttacacagagtagacttgaaacacactttttgttgaatttgcaagtggagatttcagccgctttgaggtcaatggtagaataggaaatatcttcctatagaaactagacagaatcattctcagaaactgctctgcgatgtgtgcgttcaactctcagagtttaacttttcttttcattcagcagtgtggaaacactctgtttgtaaagtctgaaggtggatatgttgaccacttagaggccttcgttggaaacgggtttttttcctgtaaggctagacagaggaattctcagtaacttccttgtgttgtgtgtattcaactcacagagttgaacgatcctttacacagagcagacttgaaacactctttttgtggaatttgcaagtggagatttcagccgctttgagttcaatggtagaataggaaatatcttcctatagaaactagacagaatgattctcagaaactcctttgtgatgtgtgcgttcaactcacagagtttaacgtttcttttcatagagcagttaggaaacactctgtttgtaaagtctgcaagtggatattcagacctccttgaggctttcgttggaaacgggatttcttcctattctgctagacagaagaattctcagtaacttccttctgttgtgtgtattcaactgacagagttgaagtttcatttagagagagcagatttgaaacactgtttttgtggaatttgcaagtggagatttcaagcgctttggggccaaaggcagaaaaggaaatatcttcgtataaaaactagacagaatcattctcagaaactgctctgcgatgtgtgcgttcaactctcagagtttaacatttcttttcattcagcagtttggaaacactctgtttgtaaagtctgcacgtggatattttgaccacttagaggccttcgttgcaaacgggtttttttcctgtaaggctagacagaagaattctcagtaacttccttgtgttgtgtgtattcaactcacagagttgaacgatcctttacacagagcagtcttgaaacactcttgttgtggaatttgcaagtggagatttcagccgctttgaggtcaatggtagaataggaaatatgttcctatagaaactagacagaatgattctcaaaaactcctttgtgatgtgtgcgttcaactcacagagttcaacctttcttttcctagagcagttgggaaacactctgtttgtaaagtctgcaagtggatattcagacatccttgaggctttcgttggaaacgggatttcttcatgttctgctagacagaagaattctcagtaacttccttgtgttgtgtgtattcaactgacagagttgaacattcatttagagagagcagatttgaaacactgtttttgtggaatttgctagtggagatttcaagagctttggggccaaaggcagaaaaggaaatatcttcgtataaaaactagacagaaatcattctcagaaactgctctgcgatgtgtgcgttcaactctcagagtttaacttttcttatcattcagcagtttggaaacactctgtttgtaaagtctgcacgtggataatttgaccacttagaggccttccttggaaacgggtttttttcatgtaaggctagacagaagaattcccagtaacttccttgtgttgtgtacattcaactcacagagttgaacgttcccttagagagaacacatttgaaacactctttttgtgcaattggcaagtggtgatttcagccgctttggggtcaatggtagaaaacgaaatatcttcgtataaaaactagacagagtgattctcagaaactcctttgtgatgtgtgcattcaactcacagagtttaacctttcttttcatagagcagttaggaaacactctgtttgtaaagtctgcaagtggatattcagacctctttgaggccttcgttggaaacgggattttttcatataaggctagacagaagaattctcagtaacttccttgtgttgtgtgtattcaactcacaggagttgaacgatcctttacacagagcagacttgaaacactctttttgcggaatttgcaagtggagatttcagccgctttgaggtcaatggtagaataggaaatatcttcctatagaaactagacagaatgattctcagaaactcctttgtgatgtgtgcgttcaactcacacagtttaacctttcttttcatagagcagttgggaaacactctgtttgtaaagtctgcaagtggatattcagacctccttgcggccttcgttggaaacgggatttcttcatattatgctagacagaagaattctcagtaacttccttgtgttgtgtgtattcatctgacacagttgaactttcatttagagagagcagatttgaaacactatttttgtggaatttgcaagtggagatttcaagcgctttggggccaaaggcagaaaagtaaatatcttcgcatacaaactagacagaatcactctcagaaactgctctgtgatgtgtgcgttcaactctcagagtttaacttttcttttcattcagcagtttggaaacactctgtttgtaaactctgcacgtggatattttgaccacttagaggccttctttggaaacgggtttttttcatgtaaggatagacagaagaattctcagtaacttccttgtgttgtgtgctttcaactcacggagttgaacgatcctttacacagagcagattagaaacactctttttgtggaatttgcaagtggagatttcagacactttgaggtcaatgatagaaaaggaaatatcttcgtataaaaactagacagaacgattctcagaaactcctttgtgatgtatgcgttcaactcacagagtttaacctttcttttcatagagcagttaggaaacactctgtttgtaaagtctgcaagtggatattcagacctctttgaggccttcgttggaaacgggatttcttcatattctgctagacagaagaattctcagtaacttccttgtgttgtgtgtattcaactgacagagttgaactttcatttagagagagcagatttgaaaaactgtttttgtggaatttgcaagtggagatttcaagcgctttggggccaaaggcagaaaaggaaatatcttcgtataaaaactagacagaatcattctcagaaactgctctgcgatgtgtgcgttcagctctcagagtttaacttttcttttcattcagcagtttggaaacactctgtttgtaaagtctgcacgtggatattttgaccacttagaggccttcgttggaaacgggtttttttcatgtaaggctagacagaagaattctcagtaacttccttgtgttgtgtgtattcaactcacagagttgaacgattctttacacagagcagacttgtaacactctttttgtggaatttgcaagtggagatttcagccgctttgaagtcaaaggtagaaaaggaaatatcttcctataaaaactacacagagtgattctcagaaactcctttgtgatgtgtgcgttcaactcacagagtttaacctttcttttcatagagcagataggaaacactctgtttgtaaagtctgcaagtggatattcagacctccttgaggccttcattggaaacgggatttcttcatattctgctagacagaagaattcccagtaacttccttgtgttgtgtgtgttcaactcacagagttgaactttcatttacacagagcagatttgaaacactctttttgtggaatttgcaagtggaggtttcaagcgctttgaggccaaaggcagaaaaggaaataccttcgtataaaaactagacagaatcattctcagaaactgctctgcgatgtgggcgttcaactctcagagtttaacttttcttttcattcagcagtttggaaacactctgtttgtaaagtctgcacgtggatattttgaccatttagaggccttcgttggaaacgggtttttttcttgtaaggctagacagaagaattcccagtaacttccttgtgtagtgtacattcaactcacagagttgaacgttcccttagacagagcagatttgaaacactctttttgtgcaactggcaagtggagatttcaagcgctttgaggtcaatggcagaaaaggaaatatcttcgtttcaaaactagacagaatcattcccacaaactgcgtagtgatgtgttcgttcaactcacagagtttaacctttctgttcatagaacagttaggaaacactctgtttgtaaagtctgcaagtggatattcagacctccttgaggccttcgttggaaacgggatttcttcatattctgctagacagaagaattctcagtaacttccttgtgttgtgtgtattcaactcacagagttgaacgatcctttacacagagcagacttgaaaccctctttttgtggaatttgcaagtggagatttcagacgctttgaggtcaatggtagaaaaggaaatatcttcttataaagactagacagaatgattctcagaaactcctttgtgatgtgtgtgttcaactcacagagtttaacctttcttttcatagagcagttaggaaacactctgtttgtaaagtctgcaagtggatattcagacctctttgaggccttcgttggaaacgggtttttttcatatagggctagacagaagaattctcagtaacttctttgtgttgtgtgtattcaactcacggagttgaacgatcctttacacagagcagacttgaaacactctttttgtggaatttgcaagtggagatttctgccgctttgaggtcaatggtagaataggaaatatcttcctatagaaaatacacagaatgtttctcagaaactcctttgagatgtgtttgttcaactcacagagtttaacctttcttttcatagagcagttaggaatcactctgtttgtaaagtctgcaagtggatattcagacctctttgaggccttcgttggaaacgggtttttttcatataaggctagacagaagaattcccagtaacttccttgtattgtgtgtgttcaactcacagagttgaactttcatttacacagagcagatttgaaacactctttttgtggaatttgcaaatggaggtttcaagcgctttgaggccaaaggcagaaaaggaaatatcttcgtataaaaactagacagaatcattctcagaaactactctgcgatgtgtgcgttcaactctcagagtttaacttttcttttcattcagcagtttggaaacactctgtttgtaaagtctgcacgtggatattttgaccacttagaggccttcgttggaaatgggtttttttcctgtaaggctagacagaagaattcccagtaactttccttgtgttgtgtacattcaactcacagagttgaaagttcccttagacacagcagatttgaaacactctttttgtgcaattggcaaatggagatttcaagcgctttaaggtcaatggcagaaaaggaaatatcttcgtttcaaaactagacagaatcattcccacaaactgcgttgtgatgtgttcgttcaactcacagactttaaactttcttttcatagagcagttaggaaacagtctgtttgtaaattctgtaagtggatattctgacatcttgtggccttcgttggaaacgggatttcttcatattctgctagacagaagaattctcagtaacttccttgtgttgtgtgtattcaacttacagagttgaatgatcctttacacagagcagacttgaaacactctatttgtagaatttgcaattggagatttcagccgctttgaggtcagtagtagaaaaggtaatatcttcgtagaaaaactaaacagaatgattctcataaactcctttgtgatgtgtgcattcaactcacagagtttcacctttcttttcatagagcagttaggaaacactctgtttgtaaagtctgcaagtggatattccgacctccttgaggccttccttggaaacgggatttcttcatattctgctagacagaagaattctcactaacttccttgtgttgtgtgtattcaactcacagagttgaacgatcctttacacagagcagacttgaaacactctttttgtggaatttgcaagtggagatttcagccgctttgaggtcaatggtagaaaaggaaatatcatcgtataaagactagacagaatgattctcagaaactcctttgtgatgtgtgcgttcaactcacagagtttaacttttcttttcatagaccagttaggaaacactctgtttgtaaagtctgcaagtggatattcagacctcctttgtggccttcgttggaaacgggatttcttcatattatgctagacagaagaattcccagtaacttccttgtgttgtgtgtgttcaactcacagtagttgaacttccatttacacagagcagatttgaaacactctttttgtggaatttgcaagtggagatttcaagcgctttgaggccaaaggcagaaaaggaaatatcttcctttcaaaactagacagaatcattctcagaaactgctctgtgatgtgtgcgttcaactctcagagtttaacttttcttttcattcagcagtttggaaacactctgtttgtaaagtctgcacgtggataatttgacaacttagaggccttctttggaaacgggtttttttcatgtaaggctagacagaagaattctcagtaacttccttgtgttgtgtgtattcaactcacagagttgaacgatcctttacacagaacagacttgtaacactctttttgtggaatttgcaagtggagatttcagccgctttgaagtcaaagttagaaaaggaaatatcttcctataaaaactagacagaatcattccgacaaactgcgttgtgatgtgttcgttcaactcacagagtttaacctttctgttcatagagcagttaggaaacactctgtttgtaaagtctgttaagtggatattctgacatcttgtggccttcgttggaaacgggatttcttcatattctgctagacagaagaattctcagaatcttcccttgtgttgtgtgtattcaactcacagagttgaacgatggtttacacagagcagagttgaaacactctttttgtggaatttgaaagtggagatttcagccgctttgaggtcaaaggtagaaaaggaaatatcttcgtataaaaactagacagaatgattctcagaaactcctttgtgatgtgtgcgttcaactcacagagtttaacttttcttttcatagagcagttaggaaacattctgtttgtaaagtctgcaagtggatattcagacctctttgtggccttcgttggaaacgggatttcttcatattatgctagacagaagaattctcagaatcttccttgtgttgtgtgtattcaactcacagagttgaacgatggtttacacagagcagatttgaaacactctttttgtggaatttgcaagtggagatttcagccgctttttggtcaatggtagaaaaggaaatatcttcgtataaaaactagacagaatgattctcagaaactcctttgtgatgtgtgcgttcaactcacagagtttaacctttcttttcatagagcagttaggagacactctgtttgtaaagtctgcaagtggatattgagacatccttgaggctttcgttggaaacgggatttcttcatattctgctagaaagaggaattcccagtaacttccttgtgttgtgtgtgttcaactcacagagttgaactttgatttacacagagcagatttgaaacactctttttgtggaatttgcaagtggagatttcaagcgctttgaggccaaaggcagaaaaggaaatatcttcgtataaaaactagacagaatcattttcagaaactgctctgcgatgtgtgcgttcaactctcagagtttaacttttcttttcattcagcagtgtggaaacactctgtttgtaaagtctgcacgtggatattttgaccacttagaggccttcgttggaaacgggtttttttcctgtaaggctagacagaagaattcccagtaacttccttgtgttgtgtgcattcaactcacagagttgaacgttcccttagacagagcagatttgaaacacactatttgtgcaatttgcaagtgtagatttcaagcgctttaaggtcaatggcagaaaaggaaatatcttcgtttcaaaactagacagaatcattcccacaaactgcgttgtgatgtgttcgttcaactcacagagtttaacctttcttttcatagagcagttaggaaacagtctgtttgtaaattatgtaagtggatattctgacatcttgtggccttcgttggaaacaggatttcttcatattctgctagacagaagaattctcagaatcttccttgtgttgtgtgtattcaactcacagagttgaaggatcctttacacagagcagatttgaaacactcttttggtggaatttgcaaatggagatttcagccgctttgaggtcaatggtagaaaaggaaatatcttcgtataaaaactagacagaatgattctcagaaacttctttgtgatgtgtgcgttcaactcacagagtttaacctttctattcatagagcagttagaaaacactctgtttgtaaactctgcaagtggatattcagacctctttgaggccttcgttggaaacgggatttcttcatactatgttagacagaagaattctcagtaacttccttgtgttgtgtgtattcaactcacagagttgaacgatcctttacacagagcagacttgaaacactctttttgtggaatttgcaagtggagatttcagccgctttgtggtcaatagtagaataggaaatatcttcctatagaaactagacagaaagattctcagaaactactttgtgatgtgtgcgttcaactcacagagttcaacctttcttttcatagagcagttaggaaacactctgtgtgtaaagtctacaagtggatattcagacctccttgaggccttcgttggaaacgggatttcttcatattctgctagacagaagaattcccagtaacttccttgtgttgtgtgtgttcaactcacagagttgaactttcatttacacagagcagatttgagacactctttttgtgaaatttgcaaatggagatttcaagcgctttgaggccaaaggcagaaaaggaaatatcttcgtataaaaactagacagaatcattctcagaaactgctctgcgatgtgtgcgttcaactctcagagtttaacttttcttttcattcagcagtttggaaacactctgtttgtaaagtctgcacgtgcataatttgaccacttagaggccttcgttggaaacgggtgtttttcatgtaaggctagacagaagaattcccagtaacttccttgtgttgtgtgcattccactcacagagatgaacgttcccttagacagaacagatttgaaacactctatttgtgcaatttgcaagtgtagatttcaagcgctttaaggtcaatggcagaaaaggaaatatcttcgtttcaaaactagacagaatcattcccacaaactgcgttgtgatgcgttcgttcaactcacagagtttaacctttcttttcatagagcagttaggaaacagtctgtttgtcaattctgtaagtggatattctgacatcttgtggccttcgttggaaacgggatttcttcatattctgctagacagaagaattctcagtaactgccttgtgttgtgtgtattcaactcacagagttgaacgatcgtttacacagagcagacttgaaacgctctttttgtggaacttgcaagtggagatttcagccgctttgaggtcaatggtagaataggaaatatcttcctatagaaactagacagaatgattctcagaaactcctttgtgatgtgtgcgttcaactcacagagtttaacctttcttttcatagagcagttaggaaacactctgtttgtaaagtctgcaagtggatattcagacctccttgaggccttcgttggaaacaggatttcttcatattatgctagacagaagaattctcagtaacttccttgtgttgtgtgtattcaattcacagagttgaacgatcctttacacagagcagacttgaaacactctttttgtgtaatttgcaagtggagatttcagccgctttgaggtcaatggtagaaaaggaaatatcttcgtataaaaactagacagaatgattctcagaaactcctttgtgatgtgtgcgttcaactcacagagtttaacctttcttttcatagagcagttaggaaacactctgtttgtaaagtctgcaagtggatattcagacctctttgaggccttcgttggaaacgggttttttacttataaggctaaacagaagaattcccagtaacttccttgtgttgtgtgtgttcaactcacagagttgaactttcatttacacagagcagatttgaaacactctttttgtggaatttgcaaatggagatttcaagcgctttgaggccaaatgcagaaaaggaaatatcttcgtataaaaattagacagataatcattctcagaaactgctctgcgatgtgtgcgttcaactctcagagtttaacttttcttttcattcagcagtttggaaacactctgtttgtaaagtctgcacgtggatattttgaccacttagaggccttcgttggaaacgggtttttttcctgtaaggctagacagaagaattcccagtaacttccttgtgttgtgtgcattcaactcacagagttgaacgttcccttagacagagcagatttgaaacactctatttgtgcaatttgcaagtgtagatttctagcgctttaaggtcaatgacagaaaaggaaatatcttcgtttcaaaactagacagaatcattcccacaaactgcgttgtgatgtgtttgttcaactcacagagtttaacctttcttttcatagagcagttagcaaacagtctgtttgtcaattctgtaagtggatattctgacatcttgtggccttcgttggaaacgggatttcttcatattctgctagacagaataattctctgtaacttccatgtgttgtgtgtattcaactcacagagttgaacgatcctttacacagagcagacttgaaacactctttttgtggaatttgcaagtggagatttcagccgctttgaggtcaatggtagaataggaaatatcttcctatagaaactagacagaatgattctcataaactcctttgtgatgtgtgcgttcaacacacagagtttaacctttctgttcatagagcagttaggaaacactctgtttgtaaagtctgtaagtggatattctgacaccttgtggccttcgttggaaacgggatttcttcatattctgctagacagaagaattctcagtaactttccttgtgttgtgtgtattcaactcacagagttgaacgatcctttacacagagcagacttgaaacactctttttgtggaatttgcaagtggagatttcagccgctttgagttcaatggtagaataggaaatatcttcctacagaaactagacagaatgattctcagaaactcctttgtgatgtgtgcgttcaactcacagagtttaacttttcttttcatagagcagttaggaaacactctgtttgtaaagtctgcaagtggatattcagacctctttgaggccttcgttggaaacgggttttcttcatattctgctagacagaagaattctcagtaacttccttgtgttgtgtgtattcaactgacagagttgaactttcatttagagagagcagatttgaaaccctgtttttgtggaatttgcaagtggagatttcaagcactttggggccaaaggcagaaaaggaaatatcttcgtataaaaactagacggaatcattctcagaaactgctctgggatgtgtgcgttcaactctcagagtttaacttttcttttcattcagcagtttggaaacactctgtttgtaaagtctgcacgtggataacttgaccacttggaggccttcgttggaaacgggtttttttcatgtaaggctagacagaagaattctcagtaacttccttgtgttgtgtgtattcaactcacagagttgaatgatcctttacacagaacagtcttgaaacactctttttgtggaatttgcaagtggagatttcagccgctttgaggtcaatggtacaataggaaataccttcctatagaaactagacagaatgattctcagaaactcctttgtgatttgtgcgtttaactcacagagtttaacctttcttttcatagagcagttaggaaacactctgtttgtaaagtctacaagtggatattcagacctctttgaggccttcgttggaaacgggtttttttcatataaggctagacagaagagttctcagtaacttccttgtgttgtgtgtattcaactcacagagttgaactttcatttagagagagcagatttgaaacactgtttttgtggaatttgcaattggagatttcaagtgctttggggccaaaggcagaaaaggaaatatcttcgtataaaaactagacagagaatcattatcagaaactgctgcgtgatgtgtgcgttcaactctcagaatttaacttttcttttcattcagcggtttggaaacactctgtttgtaaagtctgcacgtggatatattgaccacttagaggccttcgttggaaacgggtttttttcatgtaaggctagacagaagaattcccagcaacttccttgtgttgtgtgcattcaactcacagagttgaacgttcccttagacagaccagatttgaaacactctatttgtgcaatttgcaagtgtagatttcaagcgctttgaggtcaatggcagaaaaggaaatatcttcgtttcaaaactagacagaatcattcccacaaactgcgttgtgatgtgttcgttcaactcacagagttaaacttttcttttcatagaacagttaggaaacactctgtttgtaaagtctgtaagttgatattctgacatcttgtggccttattggtaacgggatttcttcatattctgctagacagaagaattctcagtaacttccttgtgttgtgtgtattcacctcacagatttgaacgatcctttacaaagagcagacttgaaacactcttttagtggaatttgcaagtggaggtttcagcctctttgaggtcaatggtagaataggaaatatcttcctatagaaactagacagaatgattctcacaaactcctttgtgatgtgtgcgttcaactcacagagtttaacctttgtttacatagagcagttaggaaacacactgtttgtaaagtctgcaagtggatattctgacctccttgaggccttcggtggaaacgggatttcttcatattctgctagacagaagaattctcagtaacttccttgtgttgtgtgtattcaactcaaagagttgaacgacactttacacagagcagacttgaaacactctttttgtggaatttgcaattggagatttcagccgctttgaggtcaatggtaggataggaaatatcttcctatagaaactagacagaatgattctcagaaactcctttgtgatgtgtgcgttcaactcacagagtttaacctttcttttcttagagcagttaggaaacactctgtttgtaaagtctgcaagtggatattcagacctccttgaggccttcgttggaaatgggatttcttcatattctgctagacagaagaaattcccagtaacttccttgtgttgtgtgtgttcaactcacagagttgaactttcatttacacagagcagatttgaaacactctttttgtggaatttgcaaatggagatttcaagcgctttgaggccaaaggcagaaaaggaaatatctttgtataaaaactagacagaatcattctcagaaactgctgcgtgatgtgtgcgttcaactctcagagtttaacttttcttttcattcagcggtttggaaacactctgtttgtaaagtctgcacgtggaaattttgaccacttaggggccttcgttggaaacgggtttttttcatgtaaggctagacagaagtattcccagtaacttccttgtgttgtgtgcattcaactcacagagttgaacgttcccttagacagagcaggtttgaaacactctatttgtgcaatttgcaagtgtagatttcaagcgctttaaggtcaatggcagaaaaggaaatatcttcgtttcaaaactagacagaatcattcccacaaactgcgttgtgatgtgttcgttcaactcacagagtttaacctttctgttcatagagcagttaggaaacactctgtttttaaagtctgccagtggatattcagacctctttgaggccttcgttggaaacgggatttcttcatattctgctagacagaagaattctcagtaacttccttgtgttgtgtgtattcaactcacagagttgaacgatcctttacacagaggagacttgaaacactctttttgtggaatttgcaagtggagatttcacccgctttgaggtcaatggtagaataggatatatcttcctatagaaaatagacagaatgattctcagaaactcttttgggatgtgtgcgttcaactcacagagtttaacctttctgttcatagagcagttaggaaacactctgtttgtaaagtctgcaagtggatattcagacctccttgagaccttcgttggaaacgggatttcttcatattccgctagacagaagaattctcagtaacttccttgtgttgtgtgtattcaactcacagagttgaacgatcctttacacagagcagacttgtaacactctttttgtggaatttgcaagtggagatttcaagcgctttgaggccaaatgcagaaaaggaaatatcttcgtttcaaaactagacagaatgattctcagaaactcctttgtgatgtgtgtgttcaactcacagagtttaacctttcttttcatagagcagttaggaaacactctgtttataaagtctgcaagtggatattcagacccctttgaggtccttcgttggaaacgggatttcttcatattatgctagacagaagaattctcagtaacttccttgtgttgtgtgtattccactcacagagttgaactttcatttatagagagcagatttgcaacactgtttttgtggaatttgcaagtggagatttcaagcgctttggggccaaaggcagaaaaggaaatatcttcgtataaaaactagacagaatcattctcagaaactgctctgcgatgtgtgcgttcaactctcagagtttgacttttcttttcattcagcagttttgaaacactctgtttgtaaagtctgcacgtggatattttgaccacttagaggccttcgttggaaacgggtttttttcctgtaaggctagacagaagaattcccagtaacttctttgtgttgtgtgcattcaactcacagagttgaacgttcctttagacagagcagatttgaaacactctttttgtgcaatttgcaagtggagatttcaagcgctttgaggtcaatggcagaaaaggaaataacttcgtttcaaaactagacagtatcattcccacaaactgcattgtgatgtgtgcgttcaactcacagagtttaacctttcttttcatagagccgtttgtaagcgctctgtttgtcaagtctgcaagtggatattctgacctctttgaggacttcgttggaaacaggatttcgtcctataatactagacagaagaattctcagtaacttccttgtgttgtgtgtattcaactcacagagttgaacgatcctttacacagagcagacttgaaacactctttttctggaatttgcaagtggagatttcagccgatttgaggtcaatggtagaataggaaatatcttcctatagatactagacagaatgattctcagaacctcctttgtgatgtgtgcgttcaactcacagagtttaacctttcttttcatagagcagttaggaaacactctgtttgtaaagtctgcaagtggatattcagacatccttgaggctttccttggaaacgggatttcttcatattctgctagaaagaagaattctcagaaacttcgttgtgttgtgtgttttcaaatcacagagttcaacgatcctttacacagagtagacttgaaacactctttttgtggaattggcagggtggagatttcagctgctttgaggtcaatggtagaaaaggaaatatcttcgtataaaaactagacagaatgattctcggaaactcctttgtgaagtgtgtgttcaactcacagagtttaacctttcttttcatagagcagttaggaaacactctgtttgtaaagtctgcaagaggatattcagacctctttgaggccttcgttggaaacgggtttttttcatataaggctagacagaagaattcccagtaacttccttgtgttgtgtgtgttcaactcacagagttgaactttcatttacacagagcagatttgaaacactctttttgtggaatttgcaagtggagatttcaagcgctttgaggccaaaggcagaaaaagaaatatcttcgtttcaaaactagacagaatgattctcagaaacttctttgtgatgagtgcgttcaactcacagattttaacctttcttttcatagagcagttaggaaacactctgtttgtaaagtctgcacgtggatattttgacctcttttaggccttccttggaaacgggtttttttcatgtaagcctagacagaagaattccgagtaacttccttgtgttgtctgcattcaactcacagagttgaacgttcccttagacagagcagatttgaaacactctatttgtgcaatttgcaagtgtagatttcaagctctttaaggtcaattgcagaaaaggaaatatcttcgtttcaaaactagacagaatcattcccacaaactgcgttgtgatgtgttcgttcaactcacagagtttaacctttctgttcatagagcagttaggaaacactctgtttgtaaagtctgtaagtggatattctgacatcttgtggccttcgtgggaaacgggatttcttcatattctgctagacagaagaattctcagaatcttccttgtgttgtgtgtattcaactcacacagttgaacgattgtttacacagagcagatttgaaacactctttttgtggaatttgcaagtggagatttcagccgctttgaggtcaatggtagaaaaggaaatatcttcatataaaaactagacagaatgattctcagaaactcctttgtgatgtgtgcgttcaactcacagagtttaccctttctgttcatagagcagttaggaaacactctgtttgtaaattctgcaagtggatattcagacctacttgaggtcttcggtggaaacgggatttcttcatattctgctagacagaagaattctcactaacttccttgtgttgtgtgtattcaactcacagagttgaacgatcctttacacagagcagacttgaaacactctttttgtggaatttgcaagtggagctttcagccgctttgaggtcaatagtagaaaaggaaatatcttcgtagaaaaactagacagaaagattctcagaaactcctttgtgatgtgtgcgttcaactcacagagtttaacctttcttttaatagagcagttgggaaacactctgtttgtatactctgcaagtggatattcagacctctttgaggccttcgttggaaacgggatttcttcatattctgctagacagaagaattctcagtaacttccttgtgttgtgtgtattcaactgacagagttgaactttcatttagacagagcagatttgaaacactctttttgtggaatttgcaagtggagatttcaagcgctttgaggccaaagggagaaaaggaaatatcttcgtataaaaactagacagaatcattctcagaaactgctctgcgatgcgtgcgttcagctctcagagtttaccttttcttttcattcagcagtttggaaacactctgtttgtaaagtctgcacgtggatattttgaacacttagaggccttcgttggaaaccggtttttgtcatgtaaggctagacagaagaattcctagtaacttccttgtgttgtgtacattcaactcacagagttgaacgttcccttagacagagcagatttgaaacactctttttgtgcaattggcaagtggtgatttcagccgctttgaggtcaatggtagaaaaggaaatatcttcgtattaaaactagacagaatcattcccacaaactgcgttgtgatgtgttcgttcaactcacagagtttaacctttctgttcatacggcagttaggaaacactctgtttgtaaagtctgtaagtggatattctgacattttgtggccttcgttggaaaggggatttcttcatattctgctagacagaagaattctcagaatcttccttgtgttgtgtgtattcaactcacagagttgaacgatggtttacacagagcagatttgaaacactcttttggttgaatttgcaagtggagatttcagccgctttgaggtcaatggtagaaaaggaaatatcttcgtataaaaactagacagaatgattctcagaaacttctttgtgatgtgtgcgttcaactcacagagtttaacctttcttttcatagagcagttaggaaacactctgtttgtaaagtctgcaagtggatattcagacctctttgaggccttcgttggaaacgggatttcttcatacaatgctagacagaagaattctcagtaacttccttgtgttgtgtgtattcaactcacagaattgaacgatcctttacacagagcagacttgaaacactctttttgtggaatttgcaagtggagatttcagccgctttgagttcaatggtagaataggaaatatcttcctatagaaactagacagaatgattctcagaaactcctttgtgatgtgtgcgttcaacacacagagtttaacttttcttttcatacagcagttaggaaacactctgtttgtaaagtctgcaagtggatattcagacctctttgaggccttcgttggaaacgggatttcttcatattatgctagacagaagaattctcagtaacttccttgtgttgtgtgtattcaactgacagagttgaactttcatttagagagagcagatttgaaacactgtttttttggaatttgcaagtggagatttcaagcgctttggggccaaaggcagaaaaggaaatatcttcgtataaaaactagacagaatcattctcagaaactgctctgcgatgtgtgcgttcaactctcagagtttaacttttcttttcattcagcagtttggaaacactctgtttgtaaagtctgcacgtggataatttgaccacttagaggccttcgttggaaacgggatttcttcatactgtgctagacagaagaattcccagtaacttccttgtgttgtgtgcattcaactcacagagttgaacgttcccttagacagagctgatttgaaacactctatttgtgcaatttgcaagtgtagatttgaagcgctttcaggtcaatggcagaaaaggaaatatcttcgtttcaaaactagacagaatcattcccacaaactgcgttgtgatgtgttcgttcaactcacagagtttaacctttcttttcatagagcagttaggaaacactctgtttgtaaagtctgcaagtggatattcagacctctttgaggccttcgttggaaacgggatttcttcatgttctgctagacagaagaattctcagaatcttcctagtgttgtgtgtattcaactcacagagttgaacgatggtttacacagagcagatttgaaacactctttttgtggaatttgcaagtggagatttcagccgctttgaggtcaatggtagaaaaggaaatatcttcgtataaaaactagacagaatgattctcagaaactcctttgtgatgtgtgcgttcaactcacagagtttaacctttcttttcatagagcagttaggaaacactcggtttgtaaagtctgcaagtggatattcagacctctttgaggccttcgttggaaacgggtttttttcatataaggctagacagaagaattctcagaatcttccttgtgtggtgtgtattcaactcacagagttgaacgatcctttacacagagcagacttgaaacactctttttgtggaatttgcaagtggagatttcagccgctttgaggtccatggtagaaaaggaaatatcttcgtataaaaactagacagaatgattctcagaaactcctttgtgatgtgtgcgttcaactcacagagtttaacctttctttttatagagcagttaggaaacactctgtttgtaaagtctgcaagtggatattcagacctccttgaggccttctttggaaacgggatttcttcctattatactagacagaagaattctcagtaacttctttgtgttgtgtgtattcaactgacagagttgaactttcatttagagagagcagatttggaacactgtttttgtggaatttgcaagtggagatttcaagcgctttggggccaaaggcagaaaaggatatatcttcgtataaaaactagacagaatcattctcagaaactgctgcgtgatgtgtgcgttcaactctcagagtttaacttttcttttcattcagcggtttggaaacactctgtttgtaaagtctgcacatggatattttgaccacttagaggccttcgttggaaacgggtttttttcatgtaaggctagacagacgaattcccagtaacttccttgtgttgtgtacattcaactcagagagttgaacgttccattagacagagcagatttgaaacactctttttgtgcaattggcaagtggagatttcaagcgctttaaggtcaatggcagaaaaggaaatatcttcgtttcaaaactagacagaatcattcccacaaactgcgttgtgatgtgttcgttcaactcacagagtttaacctttctgttcatagagcagttaggaaacactctatttgtaaagtctgtaagtggatattctgacatcttgtggccttcgttggaaacgggatttcttcatattctgctagacagaagaattctcagaatcttccttgtgttgtgtgtattcaactcacagagttgaacgatcctttacacagagcagacttgaaacactctttttgtggaatttgcaagtggagatttcagccgctttgaggtccatggtagaaaaggaaatatcttggtataaaaactagacagaatgattctcagaaactcctttgtgatgtgtgcgttcaactcacagagtttaacctttcttttcatagagcagttaggaaacactctgtttgtaaagtctgcaagtggatattcagacctccttgaggccttcgttggaaacgggatttcttcatattatgttagacagaagaattctcagtaacttcctggtgttgtgtgtattcaactcacagagttgaacgatcctttacacagagcagacttgaaacactctttttgtggaatttgcaagtggagatttcagccgctttgaggtcaatggtagaataggaagtatcttcctatagaaactagacacaatgattctcagaaactcctttgtgatgtgtgcattcaactcacagagtttaacttttcttttcatagagcagttaggaaacactctgtttgtaaagtctgcaagtggatattcagacctctttgacgccttcgttggaaacgggatttcttcatattctgctagacagaagaattcccagtaacttccttgtgatgtgtgtgttcaactcacagagttgaactttcatttacacagagcagatttgaaacactctttttgtggaatttgcaaatggagatttcaagcgctttgaggccaaaggcagaaaaggaaatatcttcgtataaaaactagacagaatcattctcagcaaactgctctgcgatgtgtgcgttcaactctcagagtttaacttttcttttcattcagcagtttggaaacactctgtttgtaaagtctgcacgtggataatttcaccacttagaggtcttcgttggaaacgggtttttttcatgtaaggatagacagaagaattcccagtaacttccttctgttgtgtacattcaactcacagagttgaacgttcccttagacagagcagatttgaaacactctttttgtgcaattggcaagtggagatttcaagcgctttaaggtcaatggcagaaaaggaaatatcttcgtttcaaaactagacagaatcattcccacaaactgcgttgtgatgtgttcgttacctcacagagtttaacctttcttttcatagagtagttaggaaacactcagtttgtaaagcctgcaagtggatattcagacctctttgaggccttcgttggaaacgggatttcttcatattatgctagacagaagaattctcagtaacttccttgtgttgtgtgtattcaactcatggagttgaacgatcctttacacagagcagacttgtaacactctttttgtggaatttgcaagtggagatttcagccactttgaagtcaaaggtagaaaaggaaataacttcctataaaaactagacagaatgattctcagaaactcctttgtgatgggtgcgttcaactcacagagtttaacctttcttttcatagagcagttaggaaacactctgtttgtaaagtctgcaagtggatattgagacatctttgaggccttcgttggaaacaggatttcttcatattctgatagacagaagaattctcagtaacttccttgtgttgtgtgtattcaactcacagagttgaacgatcctttacacagagcagtcttgaaacagtctttttgtggattttgcaagtgcagatttctgccgctttgaggtcaatggtagaataggaaatatcttcctatagaaactagacagaatgattctcagaaactcctttgtgatgtgtgcgttcaactcacagagttcaacctttcttttcatagagcagttgggaaacactctgtttgtaaagtctgcaagtggattttcagacttctttgaggccatcgttggaagcgggatttcttcatattctgctagacagaagaattctcagaatcttccttgtgttgtgtgtattcaactcacagagttgaacgatcctttacacagagcagacttgaaacactctttttgtggaatttgcaagtggagatttcaagcgctttgaggccaaaggcagaataggaaatatcttcgtataaaaactagacagaatcattctcagaaactgctctgtgatgtgtgcgttcaactctcagagtttaacttttcttttcattcagcagtttggaaacactctgtttgtaaagtctgcacgtggatattttgcccacttagaggccttcgttggaaacgggtttttttcatgtaagggtagacagaagaattcccagtaacttccttgtgttgtgtacattcaactcacagagttgaacgttcccttagacagagcagatttgaaacactctttttgtgcaattggcaaatggagatttcaagcgctttaagttcaatggcagaaaaggaaatatcttcgtttcaaaactagacagaatgattctgagaaactcctttgtgatgtgtgcgttcaactcacagagtttaacctttcttttcaaagagcagttaggaaacactctgtttgtaaactctgcaagtggatattcagacctccttgaggccttcgttggaaacggggtttcttcctattatgctagacagaagaattctcagtaacttccttgtgttgtgtgtattcaactcaaagagttgaacgatcctttacacagagcagagtagaaacactctttttgtggaatttgcaagtggagatttcagactctttgaggtcaatggtagaataggaaatatcttcctatagaaactagacagaatgattctcagaaacttctttgtgatgtgtgcgttcaactcacagagtttaacctttcttttaatagagcagttaggaaacactctgtttgtaaactctgcaagtggatattcagacctctttgaggccttcgttggaaacgggatttcttcatactatgctagacagaagaattctcagtaacttccttgtattgtgtgtattcaactcacagagttgaacgatcctttacacagagcagacttgtaacacactttttgtggaatttgcaagtggagatttcagccgctttgaagtcaaaggtagaaaaggaaatatcttcctataaaaactagacagaatgattctcatgaactccattgtgatgtgtgcgttcaactcacagagtttaacctttcttttcatagagcagttaggaaacactctgtttgtaaagtctgcaagtggatattcagacctccttgaggccttcgttggaaaagggatttcttcatattctgctagacagaagaattctcagtaacttccttgtgttgtgtgtattcaactgacagagctgaactttcatttagagagagcacatttgaaacactgtttttgtggaatttgcaagtggagatttcaaacgctttggggccaaaggcagaaaaggaaatatcttcgtataaaaactagacagaatcattctcagaaactgctctgcgatgtgtgcgttcaactctcagagtttaacttttcttttcattcagcagtttggaaacactatgtttgtaaagtctgcacgtggatattttgaccacttagaggccttcgttggaaacgggtttttttcttgtaaggctagacagaagaattcccagtaacttccttgtgttgtgtacattcaactcacagagttgaacgttcccttagacagagcagatttgaaacactctttttgtgcaattggcaaatggagatttcaagcgctttaagttcaatggcagaaaaggaaatatcttcgtttcaaaactagacagaatcattcccacaaactgcgttgtgatgtgttcgttcaactcacagagtttaacctttcttttcatagagcagttaggaaacagtctgtttgtcaattctgtaagtggatattctgacatcatgtggccttcgttggaaacgggatttcttcatattctgctagacagaagaattcccagtaacttccttgtgttgtgtgtattcaactcacagagttgaacgatcctttacacagagcagacttgtaacactctttttgtggaatttgcaagtggagatttcagccactttgaagtcaaaggtagaaaaggaaataacttcctataaaaactagacagaaatgattctcagaaactcctttgtgatgtgtgcgttcaactcacagagtttaacctttcttttcatagagcagttaggaaacactgtgtttgtaaagtctgcaagtggatattcagacctctttgaggccttcgttggaaacgggtttttttcatataaggctagacagaagaattctcagaatcttccttgtgttgtgtgtattcaactcacagagttgaacgatagtttacacagagcagatttgaaacactcatttggtggaatttgcaagtggagatttcagccgctttgaggtaaatggtagaaaaggaaatatcttcgtataacaactagacagaatgattctcagaaactcctttgtgatgtgtgcgttcaactcacagagtttaacctgtcttttcatagagcagttaggaaacactctgtttgtaaagtctgcaagtggatattcagacatccttgaggctttcgttggaaacgggatttcttcatattctgctagaaagaagaattcccagtaacttcccttgtgttgtgtgtgttcaactcacagagttgaactttcatttagacagagcagatttgaaacactctttttgtggaatttgcaaatggagatttcaagcgctttgaggccaaaggcagaaaaggaaatatcttcgtataaaaactagacagaatcattctcagaaactgctgcgagatgtgtgcgttcaactctcagagtttaacttttcttttcattcagcggtttggaaacactgtgtttgtaaagtctgcacgtggatattttgaccacttagaggccttcgttggaaacgggtttttttcatgtaaggctagacagaagaattctcagtaacttccttgtgttgtgtgtattcaactcacagagttgaacgatcctttacacagagcagacttgaaacactctttttgtggaatttccaagtggagatttcagccgctttgaggtcaatggtagaaaaggaaatatcttcgtataaagactagacagaatgattctcagaaactcctttgtgatgtgtgcgttcaactcacagagtttaacttttcttttcatagagcagttaggaaacactctgtttgtaaagtctgcaagtggatattcagacctctttgaggccttcgttggaaacgagatttcttcatattctgctagacagaagaattctcagtaacttccttgtgttgtgtgtattcaactgacagagttaaactttcatttagagagagcagatttgaaacactgtttttgtggaatttgcaagtggagatttcaagcgctttgtggccaaaggtagaaaaggaaatatcttcgtataaaaactagacagaatcattctcagaaactgctctgcgatgtgtgcgttcaactctcagagtttaactttgcttttcattcagcagtttggaaacactctgtttgtaaagtctgcacgtggataacttgaccacttagaggccttcgttggaaacgggtttttttcatgtaaggctagacagaataattctcagtaacttccttgtgttgtgtgtattcaactcacagagttgaacgatcctttacagagagcagaattgaaacactctttttgtggaatttgcaagtggagatttcagccgctttgaggtcaatggtagaataggaaatatcttcctatagaaaatagacagaatgattctcataaactcctttgtgatgtgtgcgttcaactcacagggtttaacctttcttttcatagagcagttaggaaacactctgtttgtaaagtctgcaagtggatattcagacctactttgaggccttcgatggaaacgggattttttcatattctgctagacagaagaattcccagtaacttccttgtgttgtgtgtgttcaactcacagagttgaactttcatttacacagagcagattggaaacattctttttgtggaatttgcaagtggagatttcaagcgctttgaggtcaaaggcagaaaaggaaatatcttcgtataaaaactagacagaatcattctcagaaactgctctgcgatgtgtgcgttcaactctcagagtttaacttttcttttcattcagcattttggaaacactctgtttgtaaagtctgcacgtggatattttgaccacttagaggccttcgttggaaacgggtttctttcctgtaaggctagacagaagaattcgcagtaacttcccttgtgttgtgtacattcaactcacagagttgaacgttcccttagacagagcagatttgaaacagtctttttgtgcaattggcaagtggagatttcaagcgctttaagttcaatggcagaaaaggaaatatcttcgtttcaaaactagacagaatcattcccacaaactgcgttgtgatgtgttggttcatctcacagagtttaacctttcttttcatagagcagttaggaaacactctgtttgtaaattctgtaagtggatattctgacatcttgtggccttcgttggaaacgggatttcttcaaattctgctagacagaagaagtctcagtaacttccttgtgttgtgtgtattcaactcacagagttgaacgatactttacacagagcagacttgaaacactctttttgtggaatttgcaactggagatttcagccgctttgaggtcaatggtagaataggaaatatcttcctatagaaactagacagaatgattctcagaaactcctttgtgatgtgtgcgttcaactcacagagtttaacttttcttttcatagagcagttaggaaacactctgtttctaaggtctgcaagtggatattcagacctctttgacgccttcgttggaaacgggatttcttcatattctgctagacagaagaattctcagtaacttccttgttttgtgtgtattcaactcacagagttgaaccatcctttacacagagcagacttgaaacactctttttgtggaatttgcaagtggagatttcagccgctttgagctcaatggtagaataggaaatatcttcctatagaaactagacagaatgattctcataaactcctttgtgatgtgtgcgttcaaatcacagagtttaacctttcttttcatagagcagttagtaaatactctgtttataaagtctgcaagtggatattcagacccctttgaggccttcgttggaaacgggatttcttcatattatgctagacagaagaattcccagtaccttccttgtgttgtgtgtgttcaactcacagagttgaactttcatttacacagagcagatttgaaacactctttttgtggaatttgcaggtggagatttcaagcgctttgaggccaaaggcagaaaaggaaatatcttcgtataaaaactagacagaatcattctcagaaactgctgcgtgatgtgtgcgttcaactctcagagtttaacttttcttttcattcagcggtttggaaacactctgtttgtaaagtctgcacgtggacattttgaccacttagaggccttcgttggaaacgggtttttttcatgtatggctagacagaagaattcccagtaacttccttgtgttgtgtacattcaactcacagagttgaacgttcccttagacagagcagatttgaaacactctttttgtgcaattggcaagtggtgatttcagccgctttgaggtcaatggtagaaaaggaaatatcttcgtataaaaactagacagaatgattctcagaaacttcattgtgacgtgtgcgttcaactcacagagtttaacctttcttttcatagagcagttaggaaacactctgtttgtaaagtctgcaagtggatattcggacctctttgaggtcttcgttggaaacgggatttcttcatactgtgctagacagaagaattctcagtaacttccttgtgttgtgtgtattgaactcgcagagttgtacgatcctttacacagagcagacttgaaacactctttttgtggaatttgcaagtggagatttcagccgctttgaggtcaatagtagaaaaggaaatatcttcgtagaaaaactagacagaatgattctcagaaactcctttgtgatgtgtgtgttcaactcacagagtttaacctttcttttcatggagcagttaggaaacactctgtttgtaaagtctgcaagaggatattcagacctctttgaagccttcgttggaaacgggtttttttcatataaggctagacagaagaattctcagtaacttccttgtgttgtgtgtattcaactcacagagttgaacgatcctttacagagagcagacttgaaacactctttttgtggaatttgcaaggggagatttcagccgctttgaggtcaatagtagaaaaggaaatatcttcgtataaagactagacagaatcattctcagaaaatgctctgtgatgtgtgcgttcaactctcagagtttaacttttcttttcattcagcactttggaaacactctgtttgtaaagtctgcacgaggatattttgaccacttagaggtctttgttggaaacgggtttttttcacgtaaggctagacagaagaattcccagtaactttccttgtgttgtgtacattcaactcacagagttgaacgttcccttagacagagcagatttgaaacactctttttgtgcaattggcaagtggagatttcaagggctttaaggtcaatggcagaaaaggaaatatcttcgtttcaaaactagacagaatcattcccacaaactgcgttgtgatgtgttcgttcaactcacagagtttaacctttctgttcatagagcagttaggaaacactctgtttgtaaagtctgcaagtggatattcagacttccttgaggccttcgttggaaacgggatttcttcatattctgctagacagaagaattctcaggaacttccttgtgttgtgtgtattcaactcacagagttgaacgatcctttacacagagcagacttgaaacactctttttgtggaatttgcaagtggagatttcagccgctttgaggtcaatggtagaaaaggaaatatcttcctatagaaactagacagaatgattctcagcaaacttctttgtgatgtgtgcgttcaactcacagagtttaacctttcttttcatagagcagttaggaaacactctgtttgtaaactctgcaagtggatattcagacctctttgaggccttcgttggaaacgggatttcttcatactatgctagacagaagaattctcagtaactcccttgtgttgtgtgtattcaactcacagagttgaacgatcctttacacagagcagacttgaaacactctttttgtggaatttgcaagtggagatttcagccgctttgagttcaatggtagaataggaaatatcttcctatagaaactagacagaatgattctcagaaactcctttgtgatgtgtgcgttcaactcacagaggttaacctttcttttcatagagcagttaggaaacactctgtttgtaaagtctgcaagtggatatgcagacctccttgaggcctttgttggaacgggatttcttcatattatgctatacagaagaattctcagaaacttccttgtgttgtgtgtattcaactcacagagttgaacgatcctttacacagagcattcttgaaacactcttcttgtggaatttgcaagtggagatttcagccgctttgaggtcaatggtagaataggaaatatcttcctatagaaactagacagaatcattctcagaaactgctctgtgatgtgtgcgttcaactctcagagtttaacttttcttttcattcagcagtttggaaacactctgttcgtaaagtctgcacgtggataatttgaccacttagaggccttcgttggaaacgggtttttttcatgtaaggctagacagaagaattcccagtaacttccttgtgttgtgtacattcaactcacagagttgaacgttcccttagacagagcagatttgaaacactctttttgtgcaattggcaagtggagatttcaagagctttaaggtcaatggcagaaaaggaaatatcttcgtttcaaaactagacagaatgattctcagaaactcctttgtgatgtgtgcgttcaactcacagagtttaacctttctgttcatagagcagttaggaaacactctgtttgtaaagtctgtaagtggatattctgacatcttgtggccttcgttcgaaacgggatttcttcatattctgctagacagaagaattctcagtaacttccttgtgttgtgtgtgttcaactcacagagttgaacgatcctttacacagagcagacttgtcacactctttttgtggaatttgcaagtggagatttcagccgctttgaagtcaaaggtagaaaaggaaatatcttcctataaaaactagacagaatgattctcagaaactcctttgtgatgtctgcgttcaactcacagagtttaacctttcttttcatagagaagttaggaaacactctgtttgtaaagtctgcaagtggatattcagacctctttgaggccttcgttggaaacgggtttttttcatataaggctagacagaagaattctcagaaacttccttgtgttgtgtgtattcaactcacagagttgaacgatcatttacacagagcagacttgaaacacactttttttggtattttcaatgggagatttcagccgcttttaggtcaatggtagaaaaggaaatatcttcgtataaagactagacagaatgattctcagaaactcctttgtgatgtgtgcgttcaactcacagagtttaacctttcttttcatagagcagttaggaaacgctctgtttgtaaagtctgcaaggggatattcagacctctctgaggccttcgttggaaatgggatttcttcatattatgctagacagaagaattctcagtaacttccttgtgttgtgtgtattcaactgacagagttgaactttcatttagagagagcagatttgaaacactgtttttgtggaatttgcaagtggagatttcaagcgctttggggccaaagccagaaaaggaaatatcttcgtataaaaactagacagaatcattctcagaaactgctctgcgatgtgtgcgttcaactctcagagtttaactattcttttcattcagcagtttggaaacaatctgtttgtaaagtctgcacgtggataacttgaccacttagaggccttcgttggaaacgggtttttttcatgtaaggctagacagaagaattctcagaaacttccttgtgttgtgtgttttcaactcacagagttcaacgatcctttacacagagtagacttgaaacactgtttttgtggaattggcaagtggagatttcagccgctttgaggtcaatggtagaataggaaatatcttcgtataaaaactagacagagaatgattctcagaaactcctttgtgatgtgtgtgttcatctcacagagtttaacctttcttttcatagagcagttagtaaacactctgtttataaagtctgcaagtggatattcagacccctttgaggccttcgttggaaacgggatttcttcatattatgctagacagaagaattcccagtaacttccttgtgttgtgtgtgttcaactcacagagttgaactttcatttacacagagcagatttgaaacactctttttgtggaatttgcaagtggagatttcaagcgctttgaggccaagggcagaaaaggaaatatcttcgtataaaaactagacagaatcattctcagaaactgctctgcgatgtgtgcgttcaactctcagagtttaacttttcttttcattcagcagtttggaaacactctgtttgtaaagtctgcacgtgcataatttgaccacttagaggccttcgttggaaacgggtttttttcatgtaaggctagacagaagaattctcagtaacatccttgtgttgtgtgtattcaactcacagagttgaacgatcctttacacagagcagacttgaaacactctttttgtggaatttgcaagtagagatttcagccgctttgaggtcaatggtagaataggaaatatcttcctatagaaactagacagagtgattctcagaaactcctttgggatgtctgcgttcaactcacagagtttaacctttcttttcatagagcagttaggaaacactctgtttgaaaagtctgcaagtggatattcagacctccttgaggccttcgttggaaacgggatttcttcatattctgctatacagaagaattctcagcaacttccttgtgttgtgtgtattcaactcacagagttgaacgatcgtttacacagagcagacttgagacactctttttgtggaatttgcaagtggagatttcagcctctttgaggtcaatggtagaaaaggaaatatcttcatgtaaaaactagacagaatcattctcagaaactgctgcgtgatgtgtgcgttcaactctcagagtttaacttttcttttcattcagcggtttggaaacactctgtttgtaaagtctgcacgtggatattttgaccacttagaggccttcgttggaaacggatttttttcatgtaaggctagacagaagaattcccagtaacttccttgtgttgtgtacattcaactcacagagttgaacgttcccttagacagagcagatttgaaacactctttttgtgcaattggcaaacggagatttcaagcgctttaagttcaatggcagaaaaggaaatatcttcgtttcaaaactagacagaatcattcccacaaactgcgttgtgatgtgttcgttcaactcacagagtttaacctttcttttcatatagcagttaggaaacactctgtttgtaaagtctgcaagtggatattcagacctctttgaggccctcgttggaaacgggatttcttcatattatgctagacagaagaattctcagtaacttccttgtgttgtgtgtattcaactcacggagttgaacgatcctttacacagagcagacttgtaacactctttttgtggaatttgcaagtggagatttcagccgctttgacgtcaatggtagaaaaggaaataccttcgaataaaaactagacagaatgattctcagaaactcctttgtgatgtgcgcgttcaactcacagagtttaacctttcttttcatagagcagttaggaaacactctgtttgtaaagtctgcaagtggatattcagacatccttgaggctttcgttggaaacgggatttcttcatattctgctagaaagaagaattctcagtaacttccttgtgttgtgtgtattcaactcacagagttgaacgatcctttacacagagcagacttgaaacactctttttgtggaatttgcaagtggagatttcaagcgctttgaagccaaaggcagaaaaggaaatatcttcgtataaaaactagacagaatgattctcagaaactcctttgtgatgtgtgcgttcaagtcacagagtttaacctttcttttcatagagcagttaggaaacactctgtttgtaaagtctgcaagtggatattcagacctctttgaggccttcgttggaaacgggatttcttcatattctgctagacaaaagaatttctcagtaacttcccttgtgttgtgtgtattcaactgacagagttgaactttcatttagagagagcagatttgaaacactgtttttgtggaatttgcaaatggagatttcaagcgctttggggccaaaggcagaaaaggaaatatcttcgtataaaaactagacagaatcattctcagaaactgctgcgtgatgtgtgcgttcaactctcagagtttaacttttcttttcattcagcggtttggaaacactctctttgtaaagtctgcacgtggatattttgaccacttagaggccttcgttggaaacgggttttcttcatgtaaggctagacagaagaattcccagtaacttccttgtgttttgtacattcaacccacagagttgaacgtttccttagacagagcagatttgaaacactctttttgtgcaattggcaattggtgatttcagccgctttcaggtcaaaggtagaaaaggaaatatcttcctataaaaactagacagaatcattcccacaaactgcgttgtgatgtgttcgttcaaatcacagagtttaacctttctgttcatagagcagttaggaaacactctgtttgtaaagtctgcaagtagatattgagacctcctagaggccttcgttggaaacgggatttcttcatattctgctagacagaagaattctcagtaactcctttgtgttgtgtatattcaactcacagagttgaacgatcctttacacagagcagacttgaaacactctttttgtggaatttgcaagtggagatttcagcctctttgaggtcaatggtagaataggaaatatcttcctatagaaactagacagaatgattctcagaaactcctttgtgatgtgtgcgttcaactcacagagtttaacctttcttttcatagagcagttaggaaacactctgtttgtaaagtctgcaagtggatattcagacctccttgaggccttctttggagacgggatttcttcatattatgctagacagaagaattcccagtaacttccttgtgttgtgtgtgttcaactcacagagttgaactttgatttacacagagcagatttgaaacactctttttgtggaatttgcaagtggagatttcaagcgctttgaggccaaaggcagaaaaggaaatatcttcgtataaaaactagacagcatcattctcagaaactgctctgcgatgtgtgcgttcaactctcagagtttaacttttcttttcattcagcagtttggaaaccctctgtttgtaaagtctgcacgtggatattttgaccatttagaggctttcgttggaaacgggtttttttcttgtaaggctagacagaagaattcccagtaacttcccttgtgttgtgtgcattcaactcacagagttgaacgttcccttagacagagcagatttgaaacactctatttgtgcaatttgcaagtgtagatttcaagcgctttaaggtcaatggcagaaaaggaaatatcttcgtttgaaaactagacagaatgattcccacaaactgcgttgtgatgtgttcgttcaactcacagtagtttaacctttctgttcatagagcagttaggaaacactctgtttgtaaagtctgtaagtggatattctgacatcttgtggccttcgttgggaacgggatttcttcatattctgctagacagaagaattctcagtaacttccttgtgttgtgtgtattcaactcacacagttgaacgatcctttacacatagcagacttgtaacactctttttgtggaatttgcaagtggagattcctgccgctttgaagtcaaatgtagaaaaggaaatatcttcctataaaaactagacagaatgattctcagaaactcctttgtgatgtgtgcgttcaactcacagagtttaaccttacttttcatagagcagttaggaaacactctgtttgtaaagtctgcaagtggatatacagacatctttgaggccttcgttggaaacgggatttcttcatgttctgctagacagaagaattctcagtaacttccgcgtgttgtgtgtattgaactcacagagttgaacgatcctttacacagagcagagttgaaacactctttttgtggaatttgcaagtggagatttcagccgctttgaggtcaatggtagaaaaggaaatatcttcctataaaaactagacagaatgattctcagaaactcctttgtgatgtgtgcgttcaactcacagagttcaaactttcttttcatagagcagttgggaaacactctgtttgtaaagtctgcaagtggatattcagacttctttgaggacttcgttggaagcgggatttcttcgtattctgctagacagaaaaattcccagtaacttccttgtgttgtgagtgttcaactcacagagttgaactttcatttacacagagcagatttgaaacactctttttgtggaatttgcaagtggagatttcaagcgctttgaggccaaaggcagaaaaggaaatatcttcttataaaaactagacagaatcattctcagaaactgtggcgtgatgtgtgcgttcaactctcagagtttaacttttcttttcattcagcggtttggaaacactctgtttgtaaagtctgcacgtggatattttgaccacttagaggccttcgttggaaacggggttttttcatattctgctagacagaagaattcccagtaacttccttgtgttgtgtacattcaactcacagagttgaacgttcccttagacagagcagatttgaaacactctttttgtgcaattggcaaatggagatttcaagcgctttaaggtcaatggcaggaaaggaaatatcttcgtttcaaaactagacagaatcattcccacaaactgcgttgttatgtgttcgttcaactcacagtagtttaacctttcttttcatagagcagttaggaaacagtctgtttgtaaattctgtaagtggatattctgacatcttgtggccttcgttggaaacgggatttcttcatattctgctagacagaagaattctcagtaaattcctggtgttgtgtgtattcaactcacagagttgaacgatcctttacacagagcagacttgaaacactctttttgtggaatttgcaagtggagatttcagccgctttgaggtcaattgtagaaaaggaaatatcttcgtatagaaactagacagaatgattctcagaaacttctttgtgatgtgtgcgttcaactcacagagtttaacctttcttttcatacagcagttaggaaacactctgtttgtaaactctgcaagtggatattcagacctctttgaggccttcgttggaaacgggatttcttcatactatgctagacagaagaattctcagtaacttccttgtgttgtgtgtattcaactcacagagttgaacgatgatttacacagagcagacttgaaacactctttttgtggaatttgcaactggagatttcagccgctgtgtggtcaatggtagaataggaaatatcttcctatagaaactagacagaatgattctcagaaactgctttgtgctctgtgcgttcaactcacagagtttaacctttcttttcatagagcagttaggaaacactctgtttgtaaagtctgcaagtggatattctgacctctttggggccttcgttggaaaagggatttcttcatattatgctagacagaagaattcccagtaacttccttgtgttgtgtgtgttcaactcacagagttgaactttcatttacacagagcagatttgaaacactctttttttggaatttgcaagtggagatttcaagcgctgtgaggccaaaggcagaaaaggaaatatcttcgtataaaaactagacagaatcattctcagaaactactctgcgatgtgtgcgttcaactctcagagtttaacttttcttttcattcagcagtttggaaacactctgtttgtaaagtctgcacgtggatattttgaccacttagaggccttcgttggaaacgggtttttttcctgtaaggctagacagaagaattcccagtaacttccttgtgttgtgtacattcaactcacagagttgaacgttcccttagacagagcagatttgaaacactctttttgtgcaattggcaaatggagatttcaagcgctttaaggtcaatggcaggaaaggaaatatcttcgtttcaaaactagacagaatcattcccacaaactgcgttgtgatgtgttcgttcaactcacagagtttaacctttctgttcatagagcagttaggaaacactctgtttgcaaagtctgcaagtggatattcagacctccttgaggccttcgttggaaacgggatttcttcatattctgctagacagaagaattctcagaatcttccttgtgttgtgtgtattcaactcacagagttgaacgatggtttacacagagcagatttgaaacactctatttgtggaatttgcaagtggagatttcagccgctttgaggtccatggtagaaaaggtaatatcttcgtataaaaactagacagaatgattctcagaaactcccttgtgatgtgtgcgttcaactcacagagtttaacctttcttttcatagagcagttaggaaacactctgtttgtaaagtctgcaagtggatattcagacctccttgaggccttcgttggaaacgggatttcttcatatgatgctagacagaagaattctcagtaacttccttgtgttgtgtgtattcaactcacagagttgaacgatcctttacacagagcagacttgaaacactctatttgtggaatttgcaagtggagatttcagccgctttgaggtcaatggtagtataggaaatatcttcctatagaaactagacagaatgattctcagaaactcctttgtgatgtgtgcagttcaactcacagagtttaacctttcttttcatagagcagttaggaaacactctgtttgtaaagtctgcaagtggatattcagacctccttgaggccttcgttggaaacgggatttcttcctattatgctagacagaagaattcccagtaacttccttgtgttatgtgtgttcaactcacagagttgaactttcatttacacagagcagatttgaaacactctttttgtggaatttgcaagtggagatttcaagcgctttgaggccaaaggcagaaaaggaaatatcttcgtataaaaactagacagaatcattctcagaaactgctctgcgatgtgtgcgttcaactctcagagtttaacttttcttttcattcagaagtttggaaacactctgtttgtaaagactgcacgtggataacttgaccacttagaggccttcgttggaaacgggtttttttcatataaggctagacagaagtattcccagtaacttccttgtgttgtgtgcattcaactcacagagatgaacgttcccttagacagagcagatttgaaacactctatttgtgcaatttgcaagtgtagatttcaagcgctttaaggtcaatggcagaaaaggaaatatcttcgtttcaaaactagacagaatcattcccacaaactgcgttgtgatgtgttcgttcaactcacagagtttaacctttccgttcatagagcagttaggaaacactctgtttgtaaagtctgtaagtggatattctgacatcttctggccttcgttggaaacgggatttcttcatattctgctagacagaagaattctcagaatcttccttgtgttgtgtgtattcaactcacagagttgaacgatggtttacacacagcagatttgaaacactctttttgtggaatttgcaagtggagatttcagcctctttgaggtcaatggtagaaaaggaaatatcttcgtataaaaactagacagaatgattctcagaaacttctttgtgatgtgtgcgttcaactcacagagtttaacctttcttttcatagagcagttaggaaacactctgtttgtaaagtctgcaagtggatattcagacctctttgaggccttcgttggaaacgggatttcttcatgctatgctagacagaagaattctcagtaacttccttgtgttgtgtgtattcaactcacagagttgaacgatcctttacacggagcatacttgaaacactcttgttgtggaatttgcaagtggagatttcagcctctttgaggtcaatggtagaataggaaatatcttcctatagaaactagacagaatgattctcagaaactcctttgtgatgtgtgcgttcaactcacagagtttaacttttcttttcatagagcagttaggaaacactctgtttgtaaggtctgcaagtggatattcagacctctttgaggccttcgttggaaacgggatttcttcatattatgctagacagaagaattctcagtaacttccttgtgttgtgtgtattcaactgacagagttgaactttcatttagagagagcagatttgaaacactgtttttgtggaatttgcaagtggagatttcaagcgctttggggccaaaggctgaaaagggaatatcttcgtataaaaactagacagaatcattctcagaaactgctgcgtgatgtgtgcgttcaactctcagagtttaacttttcttttcattcagcggtttggaaacactctgtttgtaaagtctgcacgtggatattttgaccacttagaggccttcgttggaaacgggtttttttcatgtaaggctagagagaagaattcccagtaacttcccttgtgttgtgtacattcaactcacagagttgaacgtttccttagacacagcagatttgaaacactctttttgtgcaattggcaagtggtgatttcagccgctttgaggtcaatggtataaaaggaaatatcttcatataaaaactagacagaatcattcccacaaactgcgttgtgatgtgtttgttcaactcacagagtttaacctttcttttcatagagcagttaggaaacagtctgtttgtcaattctgtaagtggatattctgacatcttgtggccttcgttggaaacgggatttcttcatattctgctagacagaagaattctcagtaacttccttgtgttgtgtgtattcaactcacagaattgaacgatcctttacacagagcagacttgaaaaactctttttgtggaatttgcaagtggagatttcagccgctttgaggtcaatggtagaataggaaatatcttcctatagaaactagacagaatcattcccacaaactgcgttgtgatgtgttcgttcaactcacagagtttaacctttctgttcatagagcagttaggaaacactctctttgtaaagtccgtaagtggatattctgacatcttctggccttcgttggaaacgggatttcttcatattccgctagacagaagaattctcagtaacttccttgtgttgtgtgtattcaactcacagagttgaacgatcctttacacagagcatagttgaaacactctttttgtggaatttgcaagtggagatttcagccgctttgaggtcaatggtagaaaaggaaatatcttcgtataaagactagacagaatgattctcagaaacccctttgtgatgtgtacgttcaactcacagagtttaacctttcttttcatagagcagttaggaaacactctgtttgtaaagtctgcaagtggatattcagacctctttgaggccttcgttggaaacgggatttcttcatattctgctagacagagaattcccagtaacttccttgtgttgtgtgtgttcaactcacagagttgaactttcatttacacagagcagatttgaaacactctttttgtggaatttgcaggtggagatttcaagcgctttggggccaaaggcagaaaaggaaatatcttcgtataaaaactagacagaatcattctcagaaactactctgtgatgtgtgcgttcaactctcagagtttaacttttcttttcattcagcagtttggaaacactctgtttgtaaagtctgcacgtggatattttgaccacttagaggccttcgttggaaacgggtttttttcatttaaggctagacagaagaattcccagtaacttccttgtgttgtgtatattcaactcacagagttgaacgatcccttagacagagcagatttgaaacactctttttgtgcaattggcaagtggagacttcaagcgctttaaggtcaatggcagaaaaggaaatatcttcgtttcaaaactagacagaatcattcccaaaaactgcgttgtgatgtgttcgttcatctcagagagtttaacctttcttttcatagagcagttaggaaacagtctgtttgtaaattctgtaagtggatattctgacatcttgtggccttcgttggaaacgggatttcttcatattctgctagacagaaaggaattctcagtaacttccttgtgttgtgtttattcaactcacagagttgaatgatcctttacacagagcagacttgaaacactctttttgtggaatttgcaagtggagatttcagccgctttgaggtcaatggtagaaaagtaaatatcttcgtataaagactagacagaatgattctcagaaactcctttgtgatgtgtgcgttcaactcacagagtttaacctttcttttcatagagcagttaggaaacactctgtttgtaaagtctgcaagtggatattcagacctctttgaggctttccttggaaacgggagttcttcatattctgctagacagaagaattctcagtaacttccttgtgttgtgtgtattcaactcacagagttgaacgatcctttacacagagcagacttgaaacactgtttttgtggaatttgcaagtggagatttcggccgcgttgaggtcaaaggtagaaaagggaatatcttcgtaaagaaactagacagaatgattctcagaaactcctttgagatgtgtgtgttcaactcacagagtttaacctttcttttcatagagcagttaggaatcactctgtttgtaaagtctgcaggtggatattcagacctctttgaggccttcgttggaaacgggtttttttcatataaggctagacagaagaattctcagtaacttccttgtgttgtgtgtattcaactgacagagttgaactttcatttagagagagcagatttgaaacactgtttttgtggaatttgcaagtggagatttcaagcgctttggggccaaaggcagaaaaggaaatatcttcgtataaaaacgagacagaatcattctcagaaactgctctgcgatgtgtgcgttcaactctcagtagtttaacttttcttttcattcagcagtttggaaacactctgtttgcaaagtctgcacgtggatattttgaccacttagaggccttcgttggaaacgggtttttttcatgtaaggctagacagaagaattctcagtaacttccttgtgttgtgtgtattcaactcacagagttgaacgatcctttacacagagcctacttgaaacactgtttttgtggaatttgcaagtggagatttcagccgctttgaggtcaatggtagaaaaggaaatatcttcctatagaaactagacagaatgattctcagaaactcctttgtgatgtgtgcgttcaactcacggagtttaacctttcttttcatagagcagttaggaaacactctgtttgtaaagtctgcaagtggatattcagacctctttgaggccttcgttggaaacgggatttcttcatattctgatagacagaagaattcccagtaacttccttgtgttgtgtgtgttcaactcacagagttgaactttgatttacacagagtagatttgaaacactctttttgtggaatttgcaagtggagatttcaagcgctttgaggccaaaggcagaaaaggaaatatcttcgtataaaaactagacagaatcattctcagaaactgctgcgtgatgtgtgcgttcaactctcacagtttaacttttcttttcattcagcggtttggaaacactctgtttgtaaagtctgcacgtggatattttgaccacttagaggccttcgttagaaactggtttttttcatgtaaggctagacagaagaattcccagtaacttccttgtgttgtgtgcattcaactcacagagatgaacgttcgcttggacagagcagatttgaaacactctatttgtgcaatttgcaagtgtagatttcaagggctttaaggtcaatggcagaaaaggaaatatcttcgttccaaaactagacagaatcattcccactaactgcgttgtgatgtgttcgttcatctcacagagtttaacctttcttttcgtagagcagttaggaaacagtctgtttgtaaattctgtaagtggatattctgacatcttgtggccttcgttggaaacgggatttcttcatattctgctagacagaagaattctcagtaacttcattgtgttgtgtgtattcaactcacagacttcaacgatcctttacacagagcagacttgaaacactctttttctggaatttgcaagtggagatttcagccgctttgaggtcaatggtagaataggaaatatcttcctatagaaactagacagaatgattctcagaaactcctttgtgatgtgtgcgttcaactcacagagttcaacctttcttttcatagagcagttggaaaacactctgtttgtaaagtctgcaagtggatattcaaacttctttgaggccttcgttggaagcgggatatcttcatattctgctagacagaagaattctcagtaacttccttgtgttttgtgtattcaactcacagagttcaacgatcctttacagagagcagacttgaaacactctttttgtggaatttgcaagtggagctttcagccgctttgaggtcaatggtagaaaaggaaacatcttcgtataaaaactagacagaatgattctcagaaactcctttgtgatgtgtgcgtgcaactcacagagtttaacctttcttttcatagagcagttaggaaacactgtgtttgtaaagtctgcaagtggatattcagacctccttgaggccttcgttggaaacgggatttcttcatattatgctagacagaagaattctcagtaacttccttgtgttgtgtgtattcaactgacagagttgaacattcatttagagagagcagatttgaaacactgtttttgtggaatttgcaagttgagatttcaagaggtttggggccaaaggcagaaaaggaaatatcttcgtataaaaactagacagaatcattctcagaaactgctgcgtgatgtgtgcgttcaactctcagagtttaacttttcttttcattcagcggtttggaaacactctgtttgtaaagtctgtaagtggatattttgaccccttagaggccttcgttggaaatgggtttttttcatgtaaggctagacagaagaattcccagtaacttccttgtgttgtgtgcattcaactcacagacttgaacgttcccttagacagagcagatttgaaacactctatttgtgcaatttgcaagtgtagatttcaagcgctttcaggtcaatggcagaaaaggaaatatcttcctttcaaaactagacagaatcattcccacaaactgcgttgtgatgtgttcgttcaactcacagagtttaacctttcttttcatagagcagttaggaaacactctggttgtaaagtctgcaagtggatattcagacctctttgaggccttcgttggaaacgggatttcttcatattctgctagacagaataattctcagtaacttcccttgtgttgtgtgtattcaactcacagagttcaacgatcctttacagagagcagacttgaaacactctttttgtggaattcgcaagtggagatttcagccgctttgaggtcaatggtagaaaaggatatatcttcgtataaagactagacagaatgattctcagaaactcctttgtgatgtgtgcgttcaactcacagagtttaacctttcttttcatagagcagttaggaaacactctgtttgtaaagtctgcaagtggatattcagagctccttgaggccttctttggaaacgggatttcttcatattatgctagacagaagaattctcagtaacttccttgtgttttgtgtattcaactcacagagttcaacgatcctttacacagagcagacttgaaacactctttttgtggaatttgcaagtggagatttcagccgctttgaggtcaatggtagaaaaggaaatatcttcgtataaaaactagacagacaatgattctcagaaactcctttgtgatgtgtgtgttcaactcacagagtttaacctttcttttcatagagcagttaggaaacactctgtttgtaaagtctgcaagaggatattcagacctctttgaggccttcgttggaaacgggtttttttcatataaggctagacagaagaattcccagtaacttccttgtgttgtgtgtgttcaactcagagagttgaactctcatttacacagagcagatttgaaacactctttttgtggaatttgcaagtggagatttcaagcgctttgaggcgaaaggcagaaaaggaaatatcttcgtataaaaactagacagaattattctcagaaactgctctgcgatgtgtgcgttcaactctcagagtttaacttttcttttcattcagcagtttggaaacactctgtttgtaaagtctgcacgtggataacttgaccacttagaggccttcgttggaaacgggtttttttcatgtaaggctagacagaagaattctaagtaacttcctcgtgttgtgtgtattcaactcacagagttgagcgacgctttacacagagcagacttgaaacactctttttgtggaatttgcaattggagatttcagccgctttgaggtcaatggttgaaaaggaaatatcttcgtttcaaaactagacagaatgattctcagaaactcctttgtgatgtgtgcgttcaactcacagaggttaacctttcttttcatagagcagttaggaaacactctgtttgtaatgtctgcaagtggagattcagacctgcttgaggccttcgttggaaacgggatttcttcatattatgctagacagaagaattctcagtaagttccttgtagtgtgtgtattcaactcacagagttaaacgatcctttacacagagcatacttgaaacactctttttgtggaatttgcaagtggagatttcagccgctttgaggtcaatggtagaataggaagtatctccctatagaaattagacagaatgattctcagaaactcctttgtgatgtgtgcgttcaactcacacagtttaacctttcttttcatagagcagttaggaaacactctgtaaagtctgcaagtggatattcagacctccttgaggccttcgttggaaacgggatttcttcatattatgctagacagaagagttctcagtaacttccttgtgttgtgtgtattcaactcacagagttgaacgatcctttacacagagcagacttgaaacactctttttgtggaatttgcaagtggagatttcagccgcgttgaggtcaatggtagaaaaggaaatatcttcgtataaaaactagacagaatgattctcagaaactcctttgtgatgtgtgtgttcaactcacagagtttaacctttcttttcatagagcagttaggaaacactctgcttgtaaagtctccaagtggatattcagccctctttgaggccatcgttggaaacgggtttttttcatataaggctagacagaagaattcccagtaacttccttgtgttgtgtgtgttcaactcacagagttgaactttcatttacacagagcaggtttgaaacactctttttgtggaatttgcaaatggagatttcaagcgctttgaggccaaaggcagaaaaggaaatatcttcgtataaaaactagacagaatcattctcagaaactgctgcgtgatgtgtgcgttcaactctcagagtttaacttttcttttcattcagcggtttggaaacactctgtttgtaaagtctgcacgaggatattttgaccccttagaggccttcgttggaaacgggtttttttcatgtaaggctagacagaagaattctcagtaacttccttgtgttgtgtgtattcaactcacagagttgaaggatcctttacagagagcaggattgaaaaactctttttgtcgaatttgcaagtggagatttcagccgctttgaagccaatggtagaataggaaatatcttcttatagaaactagacagaatgattctcagaaactcctttgtgatgtgtgcgttcaactcacagaggttaacctttcttttcatagagcagttaggaaacactctgtttgtaaagtctgcaagtggagattcagacctgcttgaggccttcgttggatacgggatttcttcatattatgctagacagaagaattcccagtaactcccttgtgttgtgtgtgttcaactcacagagttgaactttcatttacacagagcagatttgaaacactctttttgtggaatttgcaaatggagatttcaagcgctttgaggccaaaggcagaaaaggaaataacttcgtttcaaaactagagagaaatcattctcagaaactgctctgcgatgtgtgcgttcaactctcagcagtttaacttttcttttcattcagcagtttggaaacactctgtttgtaaagtctgcacgtggataatttgaccacttagaggccttcgttggaaacgggtttttttcatgtaaggctagacagaagaattcccagtaacttccttgtgttgtgtacattcaactcacagagttgaacgttcccttagacagagcagatttgaaacactctttttgtgcaattggcaagtggagatttcaagcgctttaaggtcaatggcagaaaaggaaatatcttcgtttcaaaactagagagaatcattcccacaaactgcgttgtgatgtgttcattcaactcacagagtttaacctttcttttcatagagcagttaggaaacagtctgtttgtaaattctgtaagtggatattctgacatcttgtggccttcgttggaaacgggatttcttcatattctgctagacagaagaattctcagaaacttccttgtgttgtgtgtattcaactcacagagttgaacgatcctttactcagagcagacttgaaacactccttttgtggaatttgcaagagaagatttcagccgcttttaggtcaatggtagaataggaaatatcttcctatagaaactagacagaatgattctcaaaaacttctttgtgatgtgtgcgttcaactcacagagtttaacctttcttttcttagagcagttaggaaacactctgtttgtaaactctgcaagtggatattcagacctctttgaggccttcgttggaaacgggatttcttcatactatgctagacagaagaattctcagaaagttcgttgtgttgtgtgttttcaactcacagagttcaacgatcctttacacagagtagacttgaaacaccctttttgtggaattggcagggtggagatttcagccgctttgaggtcaatggaagaaaaggaaatatcttcgtataaaaactagacagaatgattctcagaaaatcttttgtgatgtgtgtgttcaactcacagagtttaacttttcttctcatagagcagttaggaaacactctgtttgtaaagtctgcaagtggatattcagacctctttgaggccttcgttggaaacgggatttcttcatattatgctagacagaagaattctcagtaacttccttgtgttgtgtgtattcaactcacagagttcaacgatcctttacacagagcagacttgaaacactctttttgtggaatttgcaagtggagatttcagccgctttgaggtcaatggcagaaaaggaaatatcttcgtataaaaactagacagaatgattctcagaaactcctttgtgatgtgtgcgttcaactcacagagtttaacctttcttttcatagagcagttaggaaacactctatttgtacagtctgcaagtggatattcagacctccttgaggccttcgttggaaacgggatttcttcatattctgctagacagaagaattctcagtaacttccttgtgttgtgtgtattcaactcacagagttgaacgatcgtttacacagagcagacttgaaacattctttttgtggaatttgcaagtggagatttcagccgctttgtggtcaatggtagaataggaaatatcttcctatagaaactagacagaatcattctcagaaactgctctgcgatgtgtgcgttcaactctcagagtttaacttttcttttcattcagcagtttggaaacactctgtttgtaaagtctgcacgtggataacttgaccacttagaggccttcgttggaaaagggtttttttcatgtaaggctagacagaagaattctcagtaacttccttgtgttgtgtttattcaacacacagagttgaatgatcctttacccagagcagacttgaaacactctttttgtggaatttgcaagtggagatttcagccgctttgaggtcaatggtagaataggaaatatcttcttatagaaactagacaaaatgattctcagaaactcctttgtgatgtgtgcgttcaactcacagagtttaacctttctgttcatagagctgttaggaaacactctgtttgtaaagtctgcaagtggatattcagacctccttgaggccttcgttggaaacgggatttcttcatattctgctagacaggagtaattcccagtaacttccttgtgttgtgtgtgttcaactcatagagttgaactttgatttacacagagcagatttgaaacactctttttgtggaatttgcaagtggagatttcaagcgctttgaggccaaaggcagaaaaggaaatatcttcgtataaaaactagacagaatcattctcagaaactgctctgcgatgtgtgcgttcaactctcagagtttaacttttcttttcattcagaagtttggaaacactctgtttgtaaagtctgcacgtggataacttgaccacttagaggccttcgttggaaacgggtttttttcacgtaaggctagacagaagaattccgagtaacttccttgtgttgtgtgcattcaaatcacagagttgaacgttcccttagacagagcagatttgaaacactctatttgtgcaatttgcaagtgtagatttcaagcgctttaaggtcaatggcagaaaaggaaatatcttcgtttcaaaactagacagaaatcattcccacaaactgcgttgtgatgtgttcattcaactcacagagcttaacctttctgttcatagagcagttaggaaacactctgtttgtaaagtctgtaagtggatattctgacatcttgtggccttcgttggaaacgggatttcttcatattctgctagacagaagaattctcagtaacttccttgtgttgtgtgtattcacctcacagagttgaacgatcctttacacagagcagacgtgtaacactctttttgtgtaatttgcaagtggagatttcagccgctttgaagtcaaaggtagaaaaggaaatatcttcctataaaaactagacagaatgattctcagaaactcctttgtgatgtgtgcgttcaactcacagagtttaaccattcttttcatagagcagttaggaaaaactctgtttgtaaagtctgcaagtcgatattcagacctccttgaggccttcgttggaaacgcgatttcttcatattctgctagacagaagaattctcagtaacttccttgtgttgtgtgtattcaactcacagagttgaactatcctttacagagagcagacttaaaacactctttttgtggaatttgcaagtggagatttcagccgctttgaggtcaatagtagaaaagcaaatatcttcgtagaaaaactagacagaatgattctcagaaactcctttgtgatgtgtgcgttcaactcacagagtttaacctttcttttcttagagcagttaggaaacactctgtttataaagtctgcaagtggatattcagacctctttgaggccttcgttggaaacgggatttcttcatattctggtagacagaagaattcccagtaacttccttgtgttgtgtgtgttcaactcacagagttgaactttcatttacacagagcagatttgaaacactctttttgtggaatttgcaagtggagatttcaagcgctttgaggccaaaggcagacaaggaaatatcttcgtataaaaactagacagaatcattctcagaaactgctctgtgatgtgtgcgttcaactctcagagtttaacttttcttttcattctacagtttggaaacactctgtttgtaaagtctgcacgtggatattttgaccacttagaggccttcgttggaaacgggtttttttcatgtaaggctagacagaagaattcccagtaacttccttgtgttgtgtgcattcaactcacagagttgaacgttcccttagacagagcagatttgaaacactctatttgtgcaatttgcaagtgtagatttcaagcgttttaaggtcaatggcagaaaaggaaatatcttcgtttcaaaactagacagaatcattcccacaaactgcgttgtgatgtgttcgttcaactcacagagtttaacctttctgttcatagagcagttaggaaacactctgtttgtaaagtctgcaagtggacattcagacctccttgaggccttcgttggaaacgggatttcttcatattctgctagacagaagaattctcagaatcttccttgtgttgtgtgtattcaactcacagagttgaacgatcctttacacagagcagacttgaaacactctttttgtggaatttgcaagtggagatttcagccgctttgaggtccatggtagaaaaggaaatatctttgtataaaaactagtcagaatgattctcagaaacttctttgtgatgtgtgcgttcaactcacagagtttaacctttcttttcatagagcagttaggaaacactctgtttgtaaactctgcaagtggatattcagacctctttgaggccttcgttggaaactggatttcttcatactatgctagacagaagaattctcagtaacttccttgtgttgtgtgtattcaactcacagagttgaacgatcctttacacagagcagacttgaaacactctttttgtggaatttgcaagtggagatttcagccgctttgaggtcaatggtagaataggaaatatcttcctatacaaactagacagaatgattctcagaaactcctttgtgatgtgtgccttcaactcacagagtttaacctttcttttcatagagcagttaggaaacactctgtttgtaaagtctgcaagtggatattccgacatccttgaggctttcgttggaaacgggatttcttcatattctgcaagaaagaagaattctcagtaacttccttgtgttgtgtgtattcaactgacagagttgaactttcatttagagagagcagatttgaaacactgtttttgtggaatttgcaaatggagatttcaagcgctttggggccaaaggcagaaaacgaaatatcttcgtataaaaactagacagaatcattctcagaaactgctctgcgatgtgtgcgttcaactctcagagtttaacttttcttttcattcagcggtttggaaacactctgtttgtaaagtctgcacgtggataatttggccacttagaggccttcgttggaaacgtgtttttttcatgtaaggctagacagaagaattctcagtaacttccttgtgttgtgtggattcaactcacagagttgaacgatcctttacacagagcggacttgaaacactcgttttgtggaatttgcaagtggagatttcagccgctttgaggtcaatggtagaaaaggaaatatcttcgtacaaaaactagacagaacgattctcagaaactcctttgtgatgtgtgcgttcaactcacagagtttaacctttcttttcatagagcagttaggaaacactctgtttgtaacgtctgcaagtggatattcagacctccttgaggccttcgttggaaacgggatttcttcctattctgctagacagaagaattcccagtaacttccttgtgttgtgtgtgttcaactcacagagttgaactttcctttacacagagcagatttgaaacactctttttgtggaatttgcaggtggagatttcaagcgctttgaggccaaaggcagaaaaggaaatatcttcgtataaaaactagacagaatcattctcagaaactgctctgcgatgtgtgcattcaactctcagagtttaatttttcttttcattcagcagtttggaaacattctctttgtaaagtctgcacgtggatattttgaccacttagaggccttcgttggaaacgggttttattcctgtaaggctagacagaagaattcccagtaacttccttgtgttgtgtacattcaacacacagatttgaacgttcccttagacagagctgatttgaaacactctttttgtgcaattggcaagtggagatttcaagcgctttaaggtcaatggcagaaaaggaaatatcttcgtttcaaaactagacagaatcattcccacaaactgcgttgtgatgtgttcgttcaactcacagagtttaacctttctgttcatagagcagttaggaaacactctgtttgtaaagtctgaaagtggatattctgacatcttgtggccttcgttggaaacaggatttcttcatattctgctagacagaagaattctcagaatcttcccttgtgttgtgtgtattccactcacagagttgaacgatggtttacacagagcagatttgaaacactctttgtgtggaatttgcaagtggagatttcagccgctttgaggtcaatggtagaaaaggaaatatcttcgtataaaaactagacagaatgattctcagaaactcctatgtgatgtgtgcgttcaactcacagagtttaacttttcttttcagagagcagttaggaaacactctgtttgtaaagtctgcaagtggatattcagacctctttgaggccttcgttggaaacgggatttcttcatattatgctagacagaagaattctcagtaacttcctcgtgttgtgtgtattcaactcacagagttgaacgatcctttacacagagcagattagaaacactctttttgtggaatttgcaagtggagatttcagccgctttgaggtcaatggtagaaaaggaaatatcttcatagaaaaactagacagaatgattctcagaaacttcattgtgatgtgtgcgttcaactcacagagtttaacctttcttttcatagagcagttaggaaacactctgtttgtaaactctgcaagtgtatattcagacctctttgaggacttcgttggaaacgggatttcttcatactgtgctagacagaagaattctcagtaacttccttctgttgtgtgtattcaactgacagagttgaactttcatttagagagggcagatttgaaacactgtttttgtggaatttgcaagtggagatttcaagcgctttggggccaaaggcagaaaaggaaatatcttcgtataaaaactagacagaatcattctcagaatctgctctgtgatgtgtgcgttcaactctcagagtttaacttttcttttcattctacagtttggaaacactctgtttgtaaagtctgcacgtggatattttgaccacttagaggccttcgttggaaacgggtttttttcatgtaaggctagacagaagaattcccagtaacttccttgtgttgtgtgcattcaactcacagagttgaacgttcccttagacagagcagatttgaaacactctatttgtgcaatttgcaagtgtagttttcaagctctttaaggtcaacggcagaaaaggaaatatctgcgtttcaaaactagacagaatcattcccacaaactgcgttgtgatgtgttcgttcatctcacagagtttaacctttcttttcatagagcagttaggaaacagtctgtttgtaaattctgtaagtggataatttgacatcttgtggccttcgttggaaacgggatttcttcatattctgctagacagaagaattctcagtaacttccttgtgttgtgtgtattcaactcacagagttgaacgatcctttacacagagcagacttgaaacactgttttagtggaatttgcaagtggagatttcagccgctttgaggtcaatggtagaataggaaatatcttcctatagaaactagaccgaatgattctcagaaactgctttgtgatttgtgcgttcaactcacagagtttaacctttcttttcatagagaagttaggaaacactctgtttgtaaagtctgcatgtggatattcagacctccttgaggccttcgttggaaacgtgatttcttcatattatgctagacagaagaattctcagtaacttccttgtgttgtgtgtattcacctcaccgatttgaacgatcctttacacagagcagacttgaaacactctttttgtggaatttgcaagtggagatttcagccgctttgaggtcaatggtagaataggaaatatcttcctatagaaattagacagaatgtttctcagaaactcctttctgatgtgtgtgttcaactcacagagtttaacctttcttttcatagagcagttaggaaacactctgtttgtaaagtctgcaagtggatattcagacctctttgaggccttcgttggaaacgggtttttttcatgtaaggctagacagaagaattcccagtaacttccttgtgttgtgtgtgttcaactcacggagttgagctttcatttacacagagcagatttgaaacactctttttgtggaatttgcaagtggagatttcaagcgctttgaggccaaaggcagaaaaggaaatatcttcgtataaaaactagacagaatcattctcagaaactgctgcgtgatgtgtgcgttcaactctcagagtttaacttttcttttcattcagcggtttggaaacactctgtttgtaaagtctgcacctggatattttgaccacttagaggccttcgttggaaacgggtttttttcatgtaaggctagacagaagaattcccagtaacttccttgtgttgtgtacattcaactcacagagttgaacagttcccttagacagagcagatttgaaacactctttttgtgcaattggcaagtggagatttcaagcgctttaaggtcaatggcagaaaaggaaatatcttcgtttcaaaactagagagaatcattcccacaaactgcgttgtgatgtgttcgttcaactcacagagtttaacttttctgttcatagagcagttaggatacactctgtttgtaaagtctgtaagtggatattctgacatcttgtggccttcgttttaaacgggatttcttcatattctgctagacagaagaattctcagaatcttccttgtgttgtgtgtattcaactcacagagttgaacgatggtttacacagagcagatttgaaacactctttttgtggaatttgcaagtggagatttcagccgcttagaggtcaatggtagaaaaggaaatatcttcgtataaaaactagacagaatgattctcagaaactcctttgtgatgtgtgcgttcaattcacagagtttaacctttctattcatagagcagttaggaaacactgtgtttgtaaagtctgcaagtggatattcagacctctttgaggctttcgttggaaacgggatttcttcatattctgctagacagaagaattctcagtaacttccttgtgctgtgtgtattcaactcacagagttgaacgatccttttcagagagcagactttaaacactctttttgtggaatttgcaagtggagatttcagccgctttgaggtcaatggtagaaaaggaaatatcttcgtataaagactagacagaatgattctcagaaactcctttgtgatgtgtgcgttcaactcacagagtttaacctttctgttcatagagcatttaggaaacactctgtttgtaaagtctgcaagtggatattcagacctccttgaggccttcgttggaaacgggatttcttcatattctgctagacagaagaattctcagtaacttccttgtgttgtgtgtattcaactgacagagttgaactttcatttagagagagcagatttataacactgtttttgtggaatttgcaagtggagatttcagccgctttggggccaaaggccgaaaaggaaatatcttcgtataaaaactagacagaaatcattctcagaaactgctctgcgatgtgggtgttcaactctcagagtttaacttttcttttcattcagcagtttggaaacactctgtttgtaaagtctgcacgtggatattttcaccacttagaggccttcgttggaaacgggtttttttcctgtaaggctagacagaagaattcccagtaacttccttgtgttgtgtacattcaactcacagagttgaacgttcccttagacagagcagatttgaaacactctttttgtgcaattggcaaatggagatttcaagcgctttaagttcaatggcagaaaaggaaatatcttcgtttcaaaactagacagaatcattcccacaaactgcgttgtgatgtgttcgttcaactcacagggtttaacctttcttttcatagagcagttaggaaacagtctgtttgtcatttctgtaagtggatattctgacatcttgtggccttcgttggaaacgggatttcttcatattctgctagacagaagaattctcagcaacttccttgtgttgtgtgtattcaactcacagagttgaacgatcctttgagcagacttgaaacactctttttgtggaatttgcaagtggagatttaagccgctttgaggtcaattgtagaaaaggaagtatcttcgtataaaaactagacagaatgattctgagaaactcctttgtgatgtgtgcgttcaactcacagagtttaacctttcttttcatagagcagttaggaaacactctgtttgtgaagtctgcaagtggatattcagacatctttgaggctttcgttggaaactggatttcttcatattctgctatacagaagaattctcagaaacttccttgtgttgtgtgtattcaactcacagagttgaacgatcatttacacagagcagacttgagacactctttttgtggaatttgtaagtggacatttcagccgctttgaggtcaatggtagaaaaggaaatatcttcatataaaaactagacagaatgattctcagaaactcctttgtgatgtgtgcgttcaactcacagagtttaatctttcttttcatagagcagttaggaaacactctgtttgtaaagactgcaagtggatattcagacctctttgaggccttcgttggaaacgggtttttttcatataaggctagacagagaagattctcagtaacttccttgtgttgtgtgtattcaactcacagagttgaactttcatttacacagagcagatttgaaacactctttttgtggaatttgcaaatggagatttcaagcgctttgaggccaaaggcagaaaaggaaatatcttcgtataaaaactagacagatcattgctcagaaactgctctgggatgtgtgcgttcaactctcagagtttaacttttcttttcattcagcagtgtggaaacactctgtttgtaaagtctgcacgtggatattttgaccacttagaggccttcgttggaaacgggtttttttcctgtaaggctagacagaagaattcccagtaacttccttgtgttgtgtacattcaactcacagagttgaacgttcccttagacagagcagatttgaaatactctttttgtgcaattggcaagtggagatttcaagcgctttaaggtcaatggcagaaaaggaaatatcttggtttcaaaactagacagaatgaatcccacaaactgcgttgtgatgtgttcgttcaactcacagagtttaacctttctgttcatagagcagttaggaaacactctgtttgtaaagtctgtaagtggatattctgacattttgtggccttggttggaaatgggatttcttcatatactccaagacagaagaattctcagtaacttccttgtgttgtgtgtattcaactcacagagttgaacgatcctttacacagagcggacttgaaacacactttttgtggaatttgcaagtggagatttcagccgcattgaggtcaatggtagaaaaggaaatatcttcgtataaaagttagacagaatgattctcagaaactcctttgtgatgtgtgcgttcaactcatagagtttaacttttcttttcatagagcagttaggaaacactctgtttgtaaagacttcaagtggatattcagacctctttgaggccttcgttggaaacgggatttcttcatattctgctagacagaagaattcccagtaacttccttgtgttgtgtgtgttcaactcacagagttgaacttccgtttacacagagcagatttgaaacactctttttgtggaatttgcaaatggagatttcaagcgctttgaggccaaaggcagaaaaggaaatatcttcgtataaaaattcgacagaatcattctcagaaactgctctgcgatgtgtgcgttcaactctcagagtttaacttttcttttcattcagcagtttggaaacactctgtttgtaaagtctgcacgtggatattttgaccacttagaggccttcattggaaacgggtttctttcctgtaaggctagacagaagaattcccagtaacttccttgtgttgggtgcattaaactcacagagttgaacgttcccttagacagagcagatttgaaacactctatttgtgcaatttgcaagtgtagatttcaagcgctttaaggtcaatggcagaaaaggaaatatcttcgtttcaaaactagacagaatcattcccacaaactgcgttgtgatgtgttcgttcaactcacagagtttaacctttgttttcatagagcagttaggaaacagtctgtttgtaaattctgtaagtggatattctgacatcttgtggccttcgttggaaacgggatttcttcatattctgctagacagaagaattctcagtaacttccttgtgttgtgtgtattcaagtcacagagttgaacgatcctttacacagagcagacttgtaacactctttttgtggaatttgcaagtggagatttcagccgctttgaagtcaaaggtagaaaaggaaatatcttcctataaaaactagacagaatgattctcagaaactcctttgtgatgtgtgtgttcaactcacagagtttaacctttcttttcatagaacagttaggaatcactctgtttgtaaagtctgcaagtggatattcagacctctttgaggccttcgttggaaacgggtttttttcatataaggctagacagaagaattcccagtaacttccttgtgttgtgtgtgttcaactcacagagctgaactttcatttacacagagcagatttgaaacactctttttgtggaatttgcaagtggagatttcaagcgctttgaggccaaaggcagaaaaggaaatatcttcgtttcaaaactagacagaatgattctcagaaactcctttgtgatgtgtgcgttcaactcacagagttcaacctttcttttcatagagcagttgggaaacactctgtttgtaaagtctgcaagtgcttattcagacttctttgaggccttcgttggaagcgggatttcttcatattctgctagacagaagaattctcagtaactgccttgtgttgtgtgtattcaactcacagagttgaaggatcctttacacagagcagacttgaaacactctttttgtggaatttgcaagtggagatttcagccgctttgaggtcaatggtagaataggaaatatcttcctatagaaactagacagaatgattctcagtaaactcctttgtgatgtgtgcgttcaactcacagagtttaacctttcttttcatagagcagttaggaaacactctgcttgtaaagtctgcaagtggatattcagccctctttgaggccttcgttggaaacgggtttttttcatataaggctagacagaagaattcccagtaacttccttgtgttgtgtgtgttcaactcacagagttgaactttcatttacacagagcagatttgaaacactctttttgtggaatttgcaaatggagatttcaagcgctttgaggccaaaggcagaaaaggaaatatcttcgtacaaaaactagacagaatcattctcagaaactgctctgcgatgtgtgcgttcaactctcagagtttaacttttcttttcattcagcagtttggaaacactctgtttgtaaagtctgcacgtggataatttgaccacttagaggccttcgttggaaacgggtttttttcatgtaaggctacacagaagaattcccagtaacttccttgtgttgtgtacattcaactcacagagttgaacgtttccttagacagagcagatttgaaacactctttttgtgcaattggcaagtggagatttcaagcgctttgaggtcaatggcagaaaaggaaatatcttcgtttcaaaactagacagaatcattcccacaaactgcgttgtgatgtgttcgttcatctcacagagtttaacctttcttttcgtagagcagttaggaaacagtctgtttctaaattctgtaagtggatattctgacatcttgtggccttcgttggaaacgggatttcttcatattctgctagacagaagaattctcagaatctttccttgtgttgtgtgtattcaactcacagagttgaacgatcctttacacagagcagacttgaaacactctttttgtggaatttgcaagtggagatttcagccgctttgaggtccatggtagaaaaggaaatatcttcgtataaaaactagacagatgattctcagaaactcttttgtgatgtgtgcgttcaactcacagagtttaacctttctgttcatagagccgttaggaaacactctgtttgtaaagtctgcaagtggatattcacacctccttgtgaccttcgtttgaaacgggatttcttcatattctgctagacagaggaattctcagtaacttccttgtgttctgtgtattcaactgacagagttgaacgatcctttacacagagcagacttgaaacactctttttgtggaatttgcaagtggagatttcagcctctttgaggtcaatggtagaaaaggaaactatcttcgtatacagactagacagaatgattctcagaaactcctttgtgatgtgtgttttcaactcacagagtttaacctttcttttcatagagcagttaggaaacactctgtttataaagtctgcaagtggatattcagacccctttgaggccttcgttggaaacgggatttcttcatattatgctagacagaagaattcccagtaacttccttgtgttgtgtgtgttcaactcacagagttgaactctcatttacacagagcagatttgaaacactctttttgtggaatttgcaaatggagatttcaagcgctttgaggccaaaggcagaaaaggaaatatcttcgtttcaaaactagacagaatcattctcagaaactgctgcgtgatgtgtgcgttcaactctcagagtttaacttttcttttcattcagcggtttggaaacactctgtttgtaaagtctgcacgtggaaattttgaccacttagaggccttcgttggaaatgggtttttttcatgtaaggctagacagaagaattcccagtaacttccttgtgttgtgtgcattcaactcacagagttgaacgttcccttagacagagcagatttgaaacactctatttgtgcaatttgcaagtgtagttttcaagctctttaaggtcaacggcagaaaaggaaatatcttggtttcaaaactagacagaatcattcccacaaactgcgttgtgatgtgttcgttcaactcacagagtttaacctttctgttcatagagcagttaggaaacactctgttaagtctgtaagtggatattctgacatcttgtggccttcgttggaaacgggatttcttcatattctgctagacagaagaattctcagtaacttccttgtgttgtgtgtattcaactcacagagctgaacgatcctttacacagagcagacttgaaacattctttttgtcgaatttgcaagtggagatttcagccgctttgaggtcaatggtagaataggaaatatcttcctatagaaactagacagaatgattctcagaaaatcctttgtgacgtgtgcgttcaactcacagagtttaacttttcttttcatagagcagttaggaaacactctgtttgtaaagtctgcaagtggatattcagacctctttgaggccttcgttggaaacgggatttcttcatattctgctagacagaagaattctcagtaacttccttgtgttgtgtgtattcaactcacagagttgaacgatcctttacacagagcagacttgaaacactctttttgtggaatttgcaagtggagatttctgcctctttgaggtcaatggtagaataggagatatcttcctatagaaactagacagaatgattctcagaaactcctttttgatgtgtgcgttcaactcacagagtttaacttttcttttcatagagcagttagtaaacactctgtttataaagtctgcaagtggatattcagacccctttgaggccttcgttggaaacgggatttcttcatattgtgctagacagaagaattcccagtaacttgcttgtgttgtgtgtgttcaactcacagagttgaactttgatttacacagagcagatttgaaacactctttttgtggaatttgcaagtggagatttcaagcgctttgaggccaaaggcagaaaaggaaatatcttcgtataaaaactagacagaatcattctcagaaactgctctgcgatgtgtgcgttcaactctcagagtttaaattttcttttcattcagcagtttggaaacactctgtttgtaaagtctgcacgtggataatttgaccacttagaggccttcgttggaaacgggttttttcctgtaaggctagacagaagaattcccagtaacttccttgtgttgtgtacattcaactcacagagttgaacgttcccttagacagagcagatttgaaaaactctttttgtgcaattggcaagtggtgatttcagccgctttgaggtcaatggtagaaaaggaaatattttcgtataaaaactagacagaatcattcccacaaactgcgttgtgatgtgttcgttcaacccacagagtttaacctttctgttcatagagcagttaggaaacactctgtttgtaaagtatgaaagtggatattctgacatcttgtagccttcgttggaaacgggatttcttcgtattctgctagacagaagaattctcagtaacttccttgtgttgtgtgtattcaactcatagagttgaacgatcctttacacagagcagacttgaaacactctttttgtggaatttgcaagtggagatttcagccgctttgaggtcaatggtagaaaaggaaatatcttcgtataaagactagacagaatgattctcagaaaatcttttgtgatgtgtgcgttcaactcacagagtttaacttttcttctcatagagcagttaagaaacactctgtttgtaaagtctgcaagtggatattcagacctctttgaggccttcgttggaaacgggatttcttcaaattatgctagacagaagaattctcagtaacttccttgtgttgtgtgtattcaactcacagaattgaacgatcctttacacagagcagacttgaaacactctttttgtggaatttgcaagtggagatttcagctgctttgaggtcaatggtagaaaaggaaatatcttcgtatagaaacaagacagaatgattctcagaaactcctttgtgatgtgtgcgttcaactcacagagtttaacctttcttttcatagagcagttaggaaacactctgtttgtaaagtctgcaattggatattcagacctctttgaggccttcgttggaaacgggtttttttcatataaggctagacagaagaattctctgtaacttccttgtgttgtgtgtattcaactcacagagttgaacgatcctttacacagagcagacttgaaacactctttttgtggaatttgcaagtggagatttcagccgctttgaggtcaatggtagaataggaaatatcttcctatagaaactagacagaatgattctcagaaactcctttgtgatgtgtgcgttcaactcacagagtttaacctttcttttcatagagcagttaggaaacactctgtttgtaaattctgcaagtggatattcagacctctttgaggccttcgttggaaacgggtttttttcatataaggctagacagaagaattctcagaatcttcccttgtgttgtgtgtattcaactcaccgagttgaacgatcctttacacagagcagacttgaaacactctttttgtggaatttgcaagtggacatttcagccactttgaggtccgtggtagaaaaggaaataccttcgtataaaaactagacagaatgattctcagaaaatcttttgtgatgtgtgcgttcaactcaccgagtttaacttttcttctcatagagcagttaggaaacactctgtttgtaaagtctgcaagtggatattccgacctctttgaggccttcgttggaaacgggatttcttcatattatgctagacagaagaattcccagtaacttccttgggttgtgtgtattcaactcacagagttgaacgatcctttacacagagcagacttgtaacactctttttgtggaatttgcaagtggagatttcagccgctttgaagtcaaaggtagaaaaggaaatatcttcctataaaaactagacagaatgattctcagaaactccattgtgatgtgtgtgtccaactcacagagtttaacctttcttttcatagagcagttaggaaacactcagtttgtaaagtctgcaagaggatattcagacctctttgaggccttcgttggaaacgggtttttttcatataaggctagacagaataattctcagtaacttccttgtgttgtgtgtattcaactctcagagttgaacgatcctttacagagagcagacttgaaacactctttttgtggaatttgcaagtggagatttcagccgctttgaggtcaatggtagaataggaaatatcttcctatcgaaactagacagaatgattctcagaaactcctttgtgatgtgtgcgttcaactcacagagttcaacttttctttccatagagcagttaggaaacactctgtttgtaaagtctgcaagtggatattcagacctctttgaggccttcgttggaaacgggatttcttcatattctgcaagacagaagaattctcagtaacttccttgtgttgtgtgtattcaactcacagagttgaatgatcctttacagagagcagactttaaacacactttttgtggaatttgcaagtggagacttcagccgctttgaggtcaatggtagaaaaggaaatatcttcgtataaagactagacagaatgattctcagaaacttctttgtgatgtgtgcgttcaactcacagagtttaacctttcttttcatagagcagttaggaaagactctgtttgtaaagtctgcaagtggatattcagacctctttgaggccttctttggaaacgggtttttttcatataaggctagacataagaattctcagtaacttccttgtgttgtgtgtattcagctgacagagttgaactttcatttagagagagcagatttgaaacactgtttttgtggaatttgcaagtggagatttcaagcgctttgtggccaaaggcagaaaacgatatatcttcgtataaaaactagacagaatcattctcagaaactgctctgcgatgtgtgcgttcaactctcagagtttaacttttcttttcattcagcagtttggaaacactctgtttgtaaagtctgcacgtggataacttgaccacttagaggccttcgttggaaacgggtttttttctgtaaggctagacagaagaattcccagtaacttccttgtgttgtgtgcattcaactcacagagttgaacgttcccttagacagagcagatttgaaaaactctatttgtgcaatttgcaagtgtagatttcaagcgatttaaggtcaacggcagaaaaggaaatatcttcgtttcaaaactagacagaatcattcccacaaactgcgttgtgatgtgttcgttcaactcacagagtttaacccttctgttcatagagcagttaggaaacactctgtttgtaaagtatgcaagtggatattcagacctccttgaggccttcgttggaaacgggatttcttcatattctgctagaccgaagaattctcagtaacttccttgtgttgtgtgtattcaactcacagagttgaacgatcctttacacagagcagacttgaaacactctttttgtggaatttgccagtggagatttcagccgctttgagttcaatggtagaataggaaatatcttcctatagaaactagagagaatgattctcagaaaatcttttgtgatgtgtgcgttcaactcacagagtttaacttttcttctcatagagcagttaggaaacactctgtttgtaaagtctgcaagtggatattcagacctgtttgaggccttcgttggaaacgggatttcttcatattatgctagacagaagaattctcagtaacttccttgtgttgtgtgtattcaactgacagagttgaactttcatttagagagagcagatttgaaacactgtttttgtggaatttgcaagtggagatttcaagcgctttggggccaaaggcagaaaaggaaatatcttcgtataaaaacaagacagaatcattctcagaaactgctctgcgatgtgtgcgttcaactctcagtagtttaacttttcttttcattcagcagtttggaaacactctgtttgtaaagtctgcacgtggatattttgaccacttagaggccttctttggaaacgggtttttttcctgtaaggctagacagaagaattcccagtaacttccttgtgttgtgtgcattcaactcacagagttgaacgttcccttagacagagcagatttgaaacactctatttgtgcaattggcaagtgtagatttcaagcgctttaaggtcaatggcagaagaggaaatatcttcgtttcaaaactagacagaatcattcccacaaactgcgttgtgatgtgttcgttcaactcacagagtttaacctttctgttcatagagcagttaggaaacactctgtttgtaaagtctgtaagtggatattctgaaatcttgtggtcttcgttggaaacgggatttcttcatattctgctagacagaagaattctcagaaacttccttgtgttgtgtgtattcaactcacagagttgaacgatcgtttacacagagcagacttgagacactctttttgtggaatttgtaagtggagatttcagccgctttgaggtcaatggtagaaaaggaaatatcttcatatataaaccagacagaatgattctcataaactcctttgtgatgtgtgcgttcaactcacagagtttaacttttcatttcatagagccgttaggaaacactctgtttgtaaaatctgcaagtggatattcagacctctttgaggccttcattggaaacgggatttcttcatattatgctagacagaagaattctcagtaacttccttgtgttgtgtgtattcaactcacagagttgaacgatcctttacacagagcagacttgaaacactctttttgtggaatttgcaagtggagatttcagccgctttgaggtcaatggtagaaaaggaaactatcttcgtataaagaccagacagaatgattctcagaaactactttgtgatgtgtgcgttcaactcacagggtttaacctttcttttcatagagcggttaggaaacactctgtttgtaaagtctgcaagtggatattcagacctccttgagggcttcgttggaaacgggatttcttcatattctgctagacagaagaattctcagtaacttccttgtgttgtgtgtattcaacttacagagttgaacgatcctttacacagaacagacttgaaacactgtttttgtggaatttgcaagtggagatttcagccgctttgtggtcaatggtagaataggaaatatgttcctatagaaactagacagaatgattctcagaaactcctttgtgatgtgtgcgttcaactcacagagtttaacctttcttttcatagagcagttaggaaacactctgtatgtaaagtctgcaagtggctattcagacctctttgaggccttctttggaaacgggatttcttcatattatgttagagagaggaattctcaggaacttccttgtgttgtgtgtattcaactcacagagttgaacgatcctttacacagagcagacttgaaacactctttttgtggaatttgcaagtggagatttcagccgctttgaggtcaataggtagaataggaaatatcttcctatagaaactagacagaatgattctcagaaactcctttgtgatgtgtgcgttcaactcgcagagtttaacctttcttttcatagagcagttaggaaacactctgttggtaaagtctgcaagtggatattcagacctcgttgaggccttcgttggaaacgggatttcttcatattatgctagacagaagaattctcagtaacttccttgtgttgtgtgtattcaactcacagagttgaacgatcctttacacagagcagacttgaaacactctttttgtggaacttgcaagtggagatttcagccgctttgaggtcaattgtagaataggaaatatcttcctatagaaactagacagaatgattctcagaaacttctttgtgatgtgtgcgttcaactcacagagtttaacctttcttttcatagagcagttaggaaacactctgtttgtaaactctgcaagtggatattcagacctctttgaggccttcgttgcaaacgggatttcttcatattatgcctgacagaagaattctcagtaacttccttgtgttgtgtgtattcaacgcacagagttgaacgatcctttacacagagcatacttgaaacactcttcttgcggaatttgcaagtggagatttcagccgctttgaggtcaatggtagaataggaaatatcttcctatagaaactagacagaatgattctcagaaactcctttgtgatgtgtgcgttgaactcacagagtttaacctttcttttcatagagcagttaggaaacactctgtttgtaaagtctgcacgtggatatttggacttctttgaggccttcgttggaaacgggtttttttcatgtaaggctaggcagcagaattctcagtaacttccttgtgttgtgtgtattcaactgacagagttgaactttcatttagagagagcagatttgtaacactgtttttgtggaatttgcaagtggagatttcaagcgatttgcggccaaaggcagaaaaggaaatatcttcgtataaaaactagacagaatcattctcagaaactgctctgcgatgtgtgcgttcagctctcagagtttaacttttcttttcattcagcagtttggaaacactctgtttgtaaagtctgcacgtggatattttgaccacttagaggccttcgttggaaacgggtttttgtcatgtaaggctagacagaacaattcccagtaacttccttgtgttgtgtacattcaactcacagagttgaacgttcccttagtcagagcagatttgaaacactctttttgtgcaattggcaagtggagatttcaagcgcttaaggtcaatggcagaaaaggaaatatcttcgtttcaaaactagacagaatcattcccacaaactgcgttgtgatgtgttcgttcaactcacagagtttaacatttctgttcatagagcagttaggaaacactctgtttgtaaagtctgtaagtggatattctgacatcttgtggccttcgttggaaacgggatttcttcctattctgctagacagaagaattctcagcaacttccttgtgttgtgtgtattcaactcacagagttgaactctggtttacacagagcagatttgaaacactctttttgtggaatttgcaagtggagatttcagccgctttgaggtcaatggtagaaaaggaaatatcttcgtataaaaactagacagaatgattctcagaaactcctttgtgatgtgtgcgttcaactcacagagtttaaccattcttttcatagagcagttaggaaacactctgcttgtaaattctgcaagtggatattcagacctccttgaggccttcgttggaaacgggatttcttcatattctgctagacagaagaattctcactaacttccttgtgttgtgtgtattcaactgacagagttgaactttcatttagagagagcagatttgaaacactgtttttgtggaatttgcaagtggagatttcaagcgctttggggccaaaggcagaaaaggaaatatcttcgtataaaaactagacagaatcattctcagaaactgctctgcgatgtgtgcgttcaactctcagagtttaacttttcttttcattcagcagtttggaaacactctgtttgtaaagtctgcaagtggataatttgaccacttagaggccttcgttggaaacgggtttttttcatgtaaggctagacagaagaattctcagtaacttccttgtgttgtgtgtattcaattcacagagttgaacgatcctttacacagagcagacttgtaacactctttttgtggaatttgcaagtggagatttcagccgctttgaagtcaaaggtagaaaaggaaatatcttcctataaaaactagacagaatcattcccacaaactgcgttgtgatgtgttcgttcaactcacagcagtttaacctttctgttcatagagcagttaggaaacactctgtgtgtaaagtctgcaagtggatattcagacctctttgaggccttcgttggaaacgggatttcttcatattctgctagacagaagaattctcagtaacttcctcgtgttgtgtgtactcaactcacagagttgaacgatcctttacacagagcagacttgaaacactctttttgtgaaatttgcaagtggagatttcagccgctttgtggtcaatggtagaataggaaatatcttcctatagaaactagacagaatgattctcagaaacttctttgtgatgtgtgcgttcaactcacagagtttaaccttccttttcatagagcagttgggaaacactctgtttttaaagtctgcaagtggatattcagacctctttgaggccttcgttggaaacgggtttttttcatgtaaggctagacagaagaattctcagaaacgtcctggtgttgtgtgttttaaactcacagagttcaacgatcctttacacagagtagacttgaaacactctttttgttgaattggcaagtggagatttcagccgctttgaggtcagtggtagaaaaggaaatatcttcgtataaaaactagacagagtgattctcagaaactcctttgtgatgtctgcgttcaactcacagggtttaacctttcttttcatagagcagttaggaaacactctgtttgtaaagtctgcaagtggatattcagacctccttgaggccttcgttggaaaccggatttcttcatattttgctatacagaatatttctcagaaacttccttgtgttgtgtgtattcaactcacagagttgaacgatcctttacagagagcagacttgaaacactctttttgtggaatttgcaagtggagatttcagccgctttgaggtcaatggtagaataggaaatatcttcctatagaaactagacagaatgattctcataaactcctttgtgatgtgtgcgttcaactcacagagtttaacctttctgttcatagagcagttaggaaacactctgtttgtaaagtctgcaagtggatattcagacctctttgaggccttcgttggaaacgggatttcttcatattatgctagacagaagaattctcagtaacttccttgtgttgtgtgtattcaactcacagagttgaaggatcctttacagagagcaggcttgaaacactctttttgtcgaatttgcaagtggagatttcagccgctttcaggtcaatggtagaataggaagtatcttcttatagaaactagacagaatgattctcagaatctcctttgaaatgtgtgcgttcaactcacagagtttaacctttcttttcatagagcagttaggaaacactctgtttgtaaagtctgcaagtggatattcagacctctttgaggccttcgttggaaacgggatatcttcatattatgctagacagaagaattcccactaacttccttgtgttgtgtgtgttcaactcacagagttgaactttcatttacccagagcagatttgaaacactctttttgtggaatttgcaagtggagatttcaagcgctttgaggccaaaggcagaaaaggaaatatcttcgtttcaaaactagacagaatcattctctgaaactgctctgcgatgtgtgcgttcaactctcagagtttaacttttcttttcattcagcagtttggaaacactctgtttgtaaagtctgcacgtggatattttgaccacttagaggccttcgttggaaacgggtttttttcctgtaaggctagacagaagaattcccaggaacttccttgtgttgtgtacattcaactcacagagttgaacgttcccttagatagagcagatttgaaacactctttttgtgcaattggcaagtggtgatttcagccgctttgaggtcaatggtagaaaaggaaatatcttcgtataaaaactagacagaacgattctcagaaactcctttgtgatgtgtgcgttcaactcacagagtttaacctttcttttcatagagcagttaggaaacactctgtttgtaaagtctgcaagtggatattcagacccctttgaggccttcgttggaaacgggatttcttcatattatgctagacagaagaattctcagtaacttccttgtgttgtgtgtattcaactcacagagttgaaggatcctttacacagagcagacttgtaacactctttttgtgtaatttgcaagtggagatttcagccgctttgaggtcaatggtagaaaaggaaatctcttcgtataaaaactagacagaatgattctcagaaactcctttgtgatgtgtgccttcaactcacagagtttaacctttcttttcatagagcagttaggaaacactctgtttgtaaagtctgcaagtggatattcagacctctttgaggccttcgttggaaacgggatttcttcatactgtgctagacagaagaattcccagtaacttccttgtgttgtgtgtgttcaactcacagagttgaactttcatttacacagagcagattggaaacactctttttgtggaatttgcaagtggagatttcaagcgctttgaggccaaaggcagaaatggaaatatcttcgtataaaaactagacagaatcattctcagaaactgctctgcgatgtgtgcgttcaactctcagagtttaacttttcttttcattcagcagtttggaaacactctgtttgtaaagtctgcacatggatattttgaccacttagaggccttcgttggaaacgggtttctttcctgtaaggctagacagaagaattcccagtaacttccttgtgttgtgtacattcaactcacagagttgaacgttcccttagacacagcagatttgaaacactctttttgtgcaattggcaagtggagatttcaagcgctttaaggtcaatggcagtaaaagaaatatcttcgtttcaaaactagacagaatcattcccacaaactgcgttgtgatgtgttcgttcaactcacagagtttaacctttctgttcatagagcagttaggaaacactctgtttgtaaagtctgcaagtggatattctgacatcttgtggccttcgttggaaatgggatttcttcatattctgctagacagaagaattctcagtaacttccttgtgttgtgtgtattcaactcacagaattgaacgatcctttacacagagcagacttgaaacactctttttgtggaatttgcaattgtagatttcagccgctttgaggtcaatggtagaaaaggaaatatcttcgtatagaaacaagacagaatgattctcagaaactcctttgtgatgtgtgtgttcaactcacagagtttaacctttcttttcatagagcagttagtaaacactctgtttataaagtctgcaagtggatattcagacccctttgagtccttcgttggaaacgggatttcttcatattatgctagacagaagaattcccagtaacttccttgtgttgtgtgtgttcaactcacagagttgaactttcatttacacagagcagatttgaaacactctttttgtggaatttgcaagtggagatttcatgcgctttgaggccaaaggcagaaaaggaaatatcttcgtttcaaaactagacagaatcattctcagaaactgctgcgtgatgtgtgcgttcaactctcagagtttaacttttcttttcattcagcggtttggaaacactctgtttgtaaagtctgcacgtggaaattttgaccacttagcggccttcgttggaaacgggattttttcatgtaaggctagacagaagaattctcagtaacttccttgtgttgtgtgtattcaactcacagagttgaacgatcctttacacagagcagacttgaaacactctttttgtggaatttgcaagtggggatttcagccgctttgaggtcaatggtagaaaaggaaatatcttcgtataaagactagacagaatgattcgcagaaactcctttgtgatgtgtgcgttcaactcacagagtttaacctttcttttcatagagcagttaggaaacactctgtttgtaaagtctgcaagtggatattcagacctccttgaggccttctttggaaacgggatttcttcatattctgctagacagaagaattctcagcaacttccttgtgttgtgtgtattcaactcacagagttgaacgatcctttacacagagcagacttgaaacactctttttgtggaatttgcaagtggagatttcagccgctttgtggtcaatggtagaaaaggaaactatcttcgtataaagactagacagaatgattctcagaaactcctttgtgatgtgtgcgttcaaatcacagagtttaacttttcttttcatagagcagttaggaaaccctctgtttgtaaagtctgcaagtggatattcagacctctttgaggccttcgttggaaacgggatttcttcatattatgctagacagaagaattctcagtaacttccttgtgttgtgtatattcaactcacagagttgaatgatcctttacacagagcagacttgaaactctctttttgtggaatttgcaagtggagatttcagccgctttgaggtcaatggtagaaaagcaaatatcttcgtataaagactagacagaatgattctcagaaactcctttgtgatgtgtgcgttcaactcacagagtttaacctttcttttcatagagcagttaggaaacactctgtttctaaagtctgcaagtggatattcagacctccttgaggcattcgttggaaacgggatttcttcatattatgctagacagaagaattctcagaaacttccttgtgttgtgtgtattcaactcacagagttgaacgatcgtttacacagagcagacttgagacacactttttgtggaatttgtaagtggagatttcagccgctttgaggtcaatggtagaaaaggaaatatcttcatataaaaactagacagaatgattctcataactcctttgtgatgtgtgcgttcaactcacagagttcaacctctcttttcatagagcagttgggaaacactctgtttgtaaagtctgcaagtggatattcagacttctttgaggccttcgttggaaacgggatttcttcatattatgctagacagaagaattctcagtaacttccttgtgttgtgtttattcaacacacagagttgaatgatcctttacacagagcagacttgaaacactctttttgtggaatttgcaagtggagatttcagccgctttgaggtcaatggtagaataggaaatatcttcttatagaaactagacaaaacgattctcagaaactcctttgtgatgtgtgcgttcaactcacagagtttgacctttcttttcatagagcagttaggaaacactctgtttgtaaagtctgcaagtggatattcagacctctttgaggccttcgttggaaacgggatttcttcatattctgctagacagaataattctcagtaacttccttgtgttgtgtgtattcaactcacagatatgaaggatcctttacagagagcaggcttgaaacactctttttgtcgaatttgcaagtggagatttcagccgctttgaggtcaatggtagaataggaaatatcttcttatagaaactagacagaatgattctcagaaacttctttgtgatgtgtgcgttcaactcacagagtttaacctttcttttcatagagcagttaggaaacactctgtttgtaaactctgcaagtggatattcggacctctttgaggccttcgttggaaacgggatttcttcatactgtgctagacagaagaattcccagtaacttccttgtgttgtgtgtgttcaactcacagagttgaacttccatttacacagagcagatttgaaacactctttttgtggaatttgcaagtggagatttcaagcgctttgaggccaaaggcagaaaaggaaatatcttcgtttcaaaactagacataatcattctcagaaactgctctgcgatgtgtgctttcaactctcagagtttaacttttcttttcattcagaagtttggaaacactctgtttgtaaagtctgcacgtggataatttgaccacttagaggtcttcgttggaaacgggtttttttcatgtaaggctagacagaagaattcccagtaacttcgttgtgttttatgcattcaactcacagagttgaacgttcccttagacagagcagatttgaaacactctctttgtgcaatttgcaagtgtagatttcaagcgctttaaggtcagtggcagaaaaggaaatatcttcgtttcaaaactagacagaatcattcccacaaactgcgttgtgatgtgttcgttcaactcacagagtttaacttttctgttcatagagcagttaggaaacactctgtttgtaaagtctgcaagtggatattcagacctccttgaggccttcgttggaaacgggatttcttcatattctgctagacagaagaattctcagtaacttccttgtgttgtgtgtattcaactcacagagttgaacgatcctttacacacagcagacttgaaacactctttttgtggaatttgcaagtggagatttcagccgctttgaggtcaatggtagaaaaggaaactatcttcatataaagactagacagaatgattctcagaaactcctttgtgatgtgtgtgtccaactcacagagtttaacctttcttttcatagagcagttaggaaacactctgtttgtaaagtctgcaagaggatattcagacctctttgaggccttcggtggaaacgggtttttttcatataaggctagacagaataattctcagtaacttccttgtgttgtgtgtatccaactcacagagttgaaggatcctttacagggagcaggcttgaaacactctttttgtcgaatttgcaagtggagatttcagccgctttgaggtcaatggtagaataggaaatatcttcttatagaaactagacagaatgattctcagaaactcctttgtgatgtgtgcgttcaactcacagagttcaacctttcttttcatagagcagttaggaaacactctgtttgtaaagtctgcaagtggatattcagacatctttgaggctttcgttggaaacgggatttcttcatattctgctagaaagaagaattctcagaatcttccttgtgttgtgtgtattcaactcacagagttgaacgatccttcacacagagcagacttgaaacactctttttgtggaatttgcaagtggagatttcagccactttgaggtccatggtagaaaaggaaatatcttcgtataaaaactagacagaataattatcagaaaatcctttgtgatgtgtgcgttcaactcacagagtttaacttttcttttcatagagcagttaggaaacactctgtttgtaaagtctgcaagtggatattcagacctccttgaggccttcgttggaaacgggatttcttcatattctgctagacagaagaattctcagtaacttccttgtgttgtgtgtattcaactcacagagttgaacgatcctttacacagagcagacttgaaacactctgtttgtgaaatttgcaagtggagatttcagccgctttgaggtcaatagtagaaaaggaaatatcttcgtagaaaaactagacagaatgattctcagaaactcctttgtgatgtgtgtgttcaactcacagagtttaacctttcttttcatagagcagttcgtaaacactctgtttgtaaagtctgcaagtggatattcagacccctttgaggccttctttggaaacgggatttcttcatattatgctagacagaagatttcccagtaacttccttgtgttgtgtgtgttcaactcacagagttgaactttcatttacagagagcagatatgaaacactctttttgtggaatttgcaaatggagatttcaagcgctttgaggccaaaggcagaaaaggaaatatcttcgtataaaaactagacagaatcattctcagaaaatcctctgtgatgtgtgcgttcaactctcagagtttaacatttcttttcattcagcagtttgaaaacactctgtttgtaaagtctgcacgtggatattttgaccacttagaggccttctttggaaacgggtttttttcatgtaagtgtagacagaagaattcccagtaacttccttgtgttgtgtgcattcaactcacagagttgaacgttcccttagacagagcagatttgaaacactctttttgtgcaatttgcaagtggagatttcaagcgctttagggtcaatggcagaaaaggaaatatcttcgtttcaaaactagacagaatgattctcaggaactcctttgtgatgtgtgcgttcaactcacagagtttaacctttcttttcatagagcagttaggaaacactctgtttgtaaagtctgcaagtggatattcagacctccttgaggccttcgttggaaacgggatttcttcatattctgctagacagaagaattctcagtaacttccttgtgttgtgtgtattcaactcacagagttgaacgatcctgtacacagagcagacttgaaacactctttttgtggaatttgcaagtggagatttcagccgctttgaggtcaatggtagaataggaaatatcttcctatagaaactagacagaatgattctcagaaactcctttgtgatgtgtgcgttcaactcacagagtttaacctttcttttcatagagcagttaggaaacactctgtttgtaaagtctgcaagtggatattcagacctccttgaggccttcgttggaaacgagatttcttcatattatgctagacagaagaattctcagtaacttccttgtgttgtgtgtattcaactcacagagttgaacgatcctttacacagagcagacttgaaacactcttcttgtggaatttgcaagtggagatttcagccgctttgaggtcaatggtagaataggaaatatcttcgtataaaaactagacagaatgattctcagaaactcctttgtgatgtgtgcgttcaactcacagagtttaacttttcttttcatagatcagttaggaaacactctgtttgtaaagtctgcaagtggatattcagacctctttgaggccttcgttggaaacgggatttcttcatattctgctagacagaagaattctcagaatcttccttgtgttgtgtgtattcaactcacagagttgaacgatcctttacacagagcagacttgaaacactctttttgtggaatttgcaagtggagatttcagctgctttgacgtccatggtagaaaaggaaatatcttcgtataaaaactagacagaatgattctgagaaactcctttgtgatgtgtgcattcaactcacaaagtttatcctttcttttcatagagcagttaggaaacactctgtttgtaaagtctgcaagtggatattcagacctccttgaggccttcgttggaaacgggatttcttcatattctgctagacagaagaattctcagtaacttccttgtgttgtgtgttttcaactcacagagttgaacgatcctttacacagagcagacttgaaacactctttttgtggaatttgcaagtggagatttcagccgctttgaggtcaatggtagaataggaaatatcttcctacagaaactagacagaatgattctcagaaactcctttgtgatgtgtgcgttcaactcacacagtttaacctttcttttcatagagcagttagtaaacactctgtttgtaaagtctgcaagtggatattcagacctccttgaggccttcgttggaaacgggatttcttcatattatgctagacagaagaattcccagtaacttccttgtgttgtgtgtgttcaactcacagagttgaactttcatttacacagagcagatttgaaacactctttttgtggaatttgcaaatggagatttcaagcgctttgaggccaaaggcagaaaatgaaatatcgtcgtataaaaactagacagaatcattctcagaaactgctctgcgatgtgtgcgttcaactctcagagtttaacttttcttttcattcagcagtttggaaacactctgtttgtaaagtctgcgcgtggataatttgaccacttagaggccttcgttggaaacgggtttttttcatgtaaggctagacagaagaattctcagtaacttccttgtgttgtgtgtattcaactctcagagttgaacgatcctttacagagagcagactttaaacactctttttgtggaatttgcaagtggagatttcagccgctttgaggtcaatggtagaaaaggaaatatcttcgtataaagactagacagaatgattcgcagaaactcatttgtgatgtgtgtgttcaactcacagagtttaacctttcttttcatagagcagttaggaaacactctgtttgtaaagtctgcaagtggatattcagacctctttgaggccttcgttggaaacgggtttttttcatataaggctagacagaagaattctcggtaacttccttgtgttgtgtgtattcaactgacagagttgaactttcatttagagagatcagatttgaaacactgtttttgtggaatttgcaagtggagatttcaaacgcttaggggccaaacgcagaaaaggaaatatattcgtataaaaactagacagaatgattctcagaaactcctttgtgatgtgtgcgttcaactcacagagtttaacctttctgttcatagagcagttaggaaacactctgtttgtaaagtctgcaagtggatattcagacctccttgaggccttcgttggaaacggggtttcttcatattctgctggagagaagaattctcagcaacttccttgtgttgtgtgtattcaactcacagagttgaacgatcctttacacagagcagacttgaaacactctttttgtggaatttgcaagtggagatttcaggcgctttgaggtcaatggtagaaaaggaaactatcttcgtataaagactagacagaatgattctcagaaaatcctttgtgatgtgtgcgttcaaatctcagagtttaacttttcttttcatagagcagttaggaaacactctgtttgtaaagtctgcaagtggatattcagacctctttgaggccttcgttggaaacgggatttcttcatattatgctagacagaagaattctcagtaacttccttgtattgtgtgtattcaactgacagagttgaactttcatttagagagagcagatttgtaacactctttttgtggaatttgcaagtggagatttcaagcgctttgcggtcaatggcagaaaacgaaatatcatcgtataaaaactagacagaatcattctcagaaactgctctgcgatgtgtgcgttcaactctcagagtttaacttttgttttcattcagcagtttggaaacactctgtttgtaaagtctgcacgtggatattttgaccacttagaggccttcgttggaaacgggtttttatcctgtaaggctagacagaagaattctcagtaacttccttgtgttgtgtgtattcaactcacagagttcaacgatgctttgcacagaggagacttgaaacacactttttgttgaatttgcaagtggagatttcagccgctttgaggtcaatggtagaataggaaatatcttcctatagaaactagacagaatgattctcagaaactcctttgtgatgtgtgcgctcaactcacagagtttaacctttcttttcatagagcagttaggaaacactctgtttgtaaagtctgcaagtggatattcagacctctttgaggccttcgttggaaacgggatttcttcatattctgctaaacagaagaattctcagtaacttccttgtgttgtgtgtattcaactcacagagttgaacgatcctttacacaaagcagacttgaaacactctttttgtggaatttgcaagtggagatttcagccgctttgaggtcaatgttagaataggaaatatcttcctatagaaactagacagaaatgattctcagaaactcctttgtgatgtgtgcgttcaactcacagagtttaacctttcttttcatagagtagttaggaaacactctgtttgtaatgtctgccagtggatattcagacctctttgaggccatcgttggaaacgggatttcttcatattatgctagacagaagaattcccagtaacttccttgtgttgtgtgtgttcaactcacagagttgaactttcatttacacagagcagatttgaaacactctttttgtggaatttgcaagtggagatttcacgcgctgtgaggccaaaggcagaaaaggaaatatcttcgtataaaaactagacagaatcattctcagaaactgctctgcgatgtgtgcgttcaactctcagagtttaacttttcttttcattcagcagtttagaaacactctgtttgtaaagtctgcacgtggatattttgaccatttagaggctttcgttggaaacgggtttttttcttgtaaggctagacagaagaattcccaggaacttccttgtgttgtgtacattcaactcacagagttgaacgttcccttagacagagcagatttgaaacactctttttgtgcaattggcaagtggtgatttcagccgctttgaggtcaatggtagaaaaggaaatatcttcgtataaaaactagacagaatgattctcagaaacttcattgtgacgtgtgcgttcaactcacagagtttatcctttcttttcatagagcagttaggaaacactctgtttgtaaagtctgcaagtggatattcagacctctttgaggccttcgttggaaacgggatttcttcatactgtgctagacagaagaattctcagtaactgccttgtgttgtgtgtattcaactcacagagttgaacgatcctttacacagagcagacttgaaacactccttttgtggaatttgcaattggagatttcagccgctttgaggtcaatggtagaataggaaatatcttcctatagaaactagacagaatgattctcagaaactcctttgtgatgtgtgtgttcaactcacagagtttaacctttcttttcatagagcagttagtaaacactctgtttataaatctgcatgtggatattcagatctctttgaggccttcgttggaaacgggatttcttcatattatgctagacagaagaattctcagtaacttccttgtgttgtgtgtattcaactgacagagttgaactttcatttacagagagcagatttgaaacactgctttgtggaatttgcaagtggagatttcaagcgctttggggccaaaggcagaaaaggaaatatcttcgtataaaaactagacagaatgattctcagaaactcctttgtgacgtgtgcgttcaactcacagagtttaacttttcttttcatagagcagttaggaaacactctgtttgtaaagtctgcaagtggatattcagacctctttgaggccttcgttggaaacgggatttcttcatattctgctagacagaagaattctccctaacttccttgtgttgtgtgtattcaactcacagagttgaacgatcctttacacagagcagacttgaaacacactttttgtggaatttgcaattggagatttcagccgcgttgaggtcaatggtagaaaaggaaatatcttcgtataaaaactagacagaatcattctcagaaacttctttgtgatgtatgcgttcaactcacagagtttaaccttccttttcatagagcagttaggaaaccctctgtttgtaaactctgcaagtggatattcagacctctttgaggccttcgttggaaacgggatttcttcatactatgctagacagaagaattcccagtaacttccttgtgttgtgtgcgttcaactcacagagttgaactttgatttacacagagcagatttgaaacactctttttgtggaatttgcaagtggagatttcaagcgctttgaggccaaaggcagaaaaggaaatatcttcgtataaaaactagacagaatcattctcagaaactgctgcttgatgtttgcgttcaactctcagagtttaacttttcttttcattcagcggtttggaaacactctgtttgtaaagtctgcacgtggatattttgaccacttagaggccttcgttggaaacgggtttttttcatgtaaggctagacagaagaattcccagtaacttccttgtgttgtgtacattcaactcacagagttgaacgttcccttagacagagcagatttgaaacactctttttgtgcaattggcaagtggagatttcaagagttttaaggtcaatggcagaaaaggaaatatctgcgtttcaaaactagacagaatcattcccacagactgcgttgtgatgtgttcgttcaaatcacagagtttaacctttcttttcatagagcagttaggaaacagtctgtttgtaaattctgtaagtggattttctgacaacttgtggccttcgttggaaacgggatttcttcatattctgctagacagaagaattctcagtaacttccttgtgttgtgtgtattcaactcacagagttgaacgatcctttacacagagcagacttgaaacactctttttgtggaatttgcaagtggagatttcagccgctttgaggtcaaaggtagaataggtaatatcttcctatagaaactagacagaatgattctcagaaactcctttgtgatgtgtgcgttcaactcacagagtttaacctttctgttcacagagcagttaggaaacactctgtttgtaaagtctgcaagtggatattcagacctccttgaggccttcgttggaaacgggatttcttcgtattctgctagacagaagaattctcagtaacttccttgtgttgtgtgtattcaactgacagagttgaacgatcctttacacagagcagacttgaaacactctttttgtggaatttgcaagtggagatttcagccgctttgaggtcaatggtagaaaaggaaatatcttcgtataaagactagacagaatcattctcagaaactgctctgcgatgtgtgcgttcaactctcagagtttaacttttcttttcattcagcagtttggaaacactctgtttgtaaagtctgcacgtggatattttgaccatttagaggccttcgttggaaacgggtttttttcttgtaaggctagacagaagaattcccaggaacttccttttgttgtgtacattcaactcacagagttgaacgttcccttagacagagcagatttgaaacactctttttgtgcaattggcaagtggtgatttcagccgctttgaggtcaatggtagaaaaggaaatatcttcgtataaaaactagacagaatgattctcagaaactcctttgtgatgtgtgtgttcaactcacagagtttaacctttcttttcatagagcagttaggaaacactctgtttgtaaagtctgcaagtggatattcagacctctttgaggccttcgttggaaacgggtttttttcatattaggctagacagaagaattcccagtaacttccttgtgttgtgtgtgttcaactcacagagttgaacttcatttaaacagagcagatttgaaacactctttttgtggaatttgcaagtggagatttcaagcgctttgaggccaaaggcagaaaaggaaatatcttcgtaaaaaaatagaaagaatcattctcagaaactgctctgcgatgtgtgcgttcaactctcagagtttgacttttcttttcattcagcagtttggaaacactctgtttgtaaagtctgcacgtggaaaatttgaccacttagaggccttcattggaaacgggtttttttcatgtaaggctagacagaagaattctcagtaacttccttgtgttgtgtgtattgaactcacagagttgaacgatcctttacacagagcagacttgtaacactctttttgtggaatttgcaagtggagatttcagccactttgaagtcaaaggtagaaaaggaaatatcttcctataaaaactagacagaatcattccaagaaactgcgttgtcatgtgttcgttcaactcacagagtttaacctttctgttcatagagcagttaggaaacactctgtaaagtttgtaagtggatattctgacatcttgtggccttcgttggaaacgggatttcttcatattctgctagacagaagaattctcagtaacttccttgtgttgtgtgtattcaactcacagagttgaacgatcctttacacagagcagacttgaaacactcattttgtggaatttgcaagtggagatttcagccgctttgaggtcaatggtagaaaaggaaactatcttcatataaagactagacagaatgattctgagaaactcctttgtgatgtgtgcattcaactcacagagtttaacctttcttttcatagagcagttaggaaacactctgtttgtaaagtctgcaagtggatattcagacctccttgaggccttcgttggaaacgggatttcttcatattctgctagacagaataattctcagtaacttccttgtgttgtgtgtattcaactcacagagttgaaggatcctttacagagagcaggcttgaaacactctttttgtcgaatttgcaagtggagatttcagccgctttgaggtcaatggtagaataggaaatatcttcttatagaaagtagacagaacgattctcagaaactcctttgtgatgtgtgcgatcaactcacagagtttaacctttcttttcatagagcagttaggaaacactctgtttgtaaagtctgcaagtggatattcagacctccttgaggccttcgttggaaacgggatttcttcatattctgctagacagaagtattctcagtaacttccttgtgttgtgtgtattcaactcacagagttgaacgatcctttacaaagagcagacttgaaacactctttttgtggaatttgcaagtggagatttcagccgctttgaggtccatggtagaaaaggtaatatcttcctataaagactagacagaatgattctcagaaactcctttgtgatgtgtgcgttcaactcacagagtttaacctttctgttcatagagcagttaggaaacactctgtttgtatagtctgcaagtggatattcagacctccttgaggccttcgttggaaacgggatttcttcatattctgctagacagaagaattctcagtaacttccgcgtgttgtgtgtattcaactcagagagttgaacgatcctttacacagagcagacttgaaacactctttttgtggaatttgcaagtggagatttctgccgctttgaggtcaatggtagaaaaggaaatatcttcctataaaaactagacagaatgattctcataaactcctttgtgatgtgtgcattcaactcactgagtttcacctttcttttcatagagcagttaggaaacactctgtttgtaaagtctgcaagtggatattcagacctccttgaggccttcgttggaaacgggatttcttcatattctgctagacagaagaattctcagtaacttccttgtgttgtgtgtattcaactcacagagttgaacgatcctttacacagagcagacttgaaacactctttttgtggaatttgcaagtggagatttcagctgctttgaggtcaatggtagaaaaggaaatatcttcgtataaagactagacagaaatcattctcagtaaactgctctgcgatgtgtgcgttcaactctcagagtttaacttttcttttcattcagcagtttggaaacactctgtttgtaaagtctgcacgtggataacttgaccacttagaggacttcgttggaaacgggtttttttcctgtaaggctagacagaagaattcccactaacttccttgtgttgtgtacattcaactcacagaggtgaacgttcccttagacagagcagatttgaaacactctttttgtgcaattggcaagtggagatttcaagcgctttaaggtcaatggtagaaaaggaaatatcttcgtttcaaaactagacagaatgattctcagaaactcctttgtgatgtgtgcgttcaactcacagagtttaacctttcttttcatagagcatttgggaaacgctctgtttgtaaagtctgcaagtggatattcagacttctttgaggtcttcgttggaagcgggatttcttcatattctgctagacagaagaattctcagtaacttccttgtgttgtgtgtattcaactcacagagttgaacgatcctttacacagagcagacttgaaacactctttttgtggaatttgcaagtggagacttcagccgctttgaggtcaatggtagaataggaaatatcttcccatagaaactagacagaatgattctcagaaactcctttgtgatgtgtgcgttcaactcacagagtttaaccttccttttcatagagcagttaggaaacactctgtttgtaaagtctgcaagtgtatattcagacatccttgaggctttcgttggaaacgggatttcttcatattctgctagaaagaagaattcccagtaacttccttgtgttgtgtgtgttcaactcacagagttgaactttcatttacacagagcagatttgaaacactctttttgtggaatttgcaagtggagatttcaagcgctttgaggccaaaggcagaaaaggaaatgtcttcgtttcaaaactagacagaatcattctcagaaactgctctgcgatgtgtgcgttcaactctcagagtttaacttttcttttcattcagaagtttggaaacactctgtttgtaaagtgtgcacgtggataacttgaacacttagaggccttcgttggaaacgggtttttttcatgtaaggctagacagaagaattcccactaacatccttgtgttgtgtgtgttcaactcacagagttgaactttcatttacacagagcagatttgaaagactctttttgtgcaatttgcaaatggagatttcaagcgctttgaggccaaagacagaaaaggaaatatcttcgtttcaaaactagacagaatcattcccacaaactgcgttgtgatgtgttcgttcaactcacagagtttaacctttctgttcatagagcagttaggaaacactctgtttctaaagtctgtaagtggatattctgacatcttgtggccttcgttggaaacggggtttcttcatattctgctagacagaagaattctcagtaacttccttgtgttgtgtgtattcaactcacaccgttgaacgatcctttatacagagcagacttgaaacactgtttttgtggaatttacaagtggagatttcagccgatttgaggtcaatggtagaaaaggaaatatcttcctatagaaactagacagaatgattctcagaaactcctttgggatgtgtgtgtccaactcacagagtttaacctttcttttcatagagcagttaggaaacactctgtttgtaaagtctgcaagaggatattcagacctctttgaggccttcgttggaaacgggtttttttcatataaggctagacagaagaattcccagtaacttccttgtgttgtgtgtgttcaactcacagagttgaactttcatttacacagagcagatttgaaacactctttttgtggaatttgcaggtggagatttcaagtgctttgaggccaaaggcagaaaaggaaatatcttcgtataaaaactagacagaatgattctcagaaactcctttgtgatgtgggtgttcaactcacagtgtttaacctttcttttcatagagcagtttggaaacactctgtttgaaaagtctgcacgtgtataatatgaccacttagaggccttcgttggaaacgggttttttttcatgtaaggctagacagaagaattcccagtaacttccttgtgttgtgtgcattcaactcacagagttgaacgttcccttagacagagcagatttgaaacactctatttgtgcaatttgcaagtgtagttttcaagctctttaaggtcaacagcagaaaaggaaatatcttcgtttcaaaactagacagaatcattcccacaaactgcgttgtgatgtgttcgttcaactcacagagtttaacctttcttttcatagagcagttaggaaacagtgggtttgtaaattctgtaagtggatattctgacatcttgtggccttcgttggaaacgggatttcttcatattctgctagacagaagaattctcagaaacttccttgtgttgtgtgtattcaactcacagagttgaacgatcctttacacagagcagacttgaaacactctttttgtggaatttgcaagtggagatttctgccgctttgaggtcaatggtagaatagtaaatatcttcctatagaaactagacagaatggttctgagaaatcctttgtgaggtgtgcgttcaactcacagagtttaacctttcttttcatagagcagttaggaaacactctgtttttaaagtcttcaagtggatattcagacctccttgaggccttcgttggaaacgggatttcttcatattatgctagacagaagaattctcagtaacttccttgtgttgtgtgtattcaactcacagagttgaacgatcctttacacagagcagacttgaaacactctttttgtggaatttgcaagtggagatttcagccgctttgaggtcaatagtagaaaaggaaatatcttcatagaaaaactagacagaatgattctcagaaactcctttgtgctgtgtgcgttcagctcacagagtttaacctttcttttcatagagtagttaggaaacactctgtttgtaaagtctgcaagtggatattcagacatctttgaggccttcgttggaaacgggatttcttcatattctgctagacagaagaattctcagtaacttccttgtgttgtgtgtattcaactgacagagttgaactttcatttagagagagcagatttgtaacactgtttttgtggaatttgcaagtggagatttcaagcgctttggggccaaaggcagaaaaggaaatatcgtcgtataaaaactagacagaatcattctcagaaactgctgcgtgatgtgtgcgttcaactctcagagtttaacttttcttttcattcagcggtttggaaacactctgtttgtaaagtctgcacgtggaaattttgaccacttagaggccttctttggaaacgggtttttttcatgtaaggctagacagaagaattcccagtaacttccttgtgttgtgtgcattcaactcacagagttgaacgttcccttagacagagcagatttgaaacactctatttgtgcaatttgcaagtgtagttttcaagctctttaaggtcaacggcagaaaaggaaatatcttcgtttcaaaactagacagaatgattctcagaaactcctttgtgatgtgtgtgttcaactcacagagtttaacctttcttttcatagagcagttactaaacactctgtttataaagtctgcaagtggatattcagacccctttgaggccttcgttggaaacgggatttcttcatattatgctagacagaagaattctcagtaacttccttgtgttgtgtgtattcaactcacagagttgaacgaacctttacacagagcagacttgaaacactctttttgtggaatttgcaagtggagatttcatcccctttgaggtcaatggtagaaaaggaaatatcttcgtataaaaactagacagaatgattctcataaacttctttgtgatgtgtgcgttcaactcacagagtttaacctttcttttcatagagcagttaggaaacactctgtttgtaaactctgcaagtggatattcagacctctttgaggccttcgttggaaacgggatttctccatactgtgctagacagaagaattcccagtaacttccttgtgttgtgtgtgttcaactcacagagttgaactttcatgtacacagagcagatttgaaacactctttttgtggaatttgcaaatggagatttcaagcgctttgaggccaaaggcagaaaaggaaatatcttcgtataaaaactagacagaaatcattctcagaaactgctctgcgatgtgtgcgttcaactctcaggagtttaacttttcttttcattcagcagtttggaaacactctgtttgtaaagtctgcacgtggatattttgaccacttagaggccttcgttggaaacgggtttttttcctgtaaggctagacagaagaattcccagtaacttccttgtgttgtgtacattcaactcacagagttgaacgttcccttagacagaacagatttgaaacactctttttgtgcaattggcaaatggagatttcaagcgctttgaggtcaatggtagaaaaggaaatatcttcgtttcaaaactagacagaatcattcccacaaactgcgttgtgatgtgttcgttcaactcacagagtttaacctttcttttcatagagtagttaggaaacagtctgtttgaaaattctgtaagtagatattctgacagcttgtggccttcgttggaaacgggatttcttcatattctgctagacagacgaattctcagtaacttccttgtgttgtgtgtattcaactcacagagttgaacgatcctttacacagagcagacttgtaacactctttttgtggaatttgcaagtggagatttcagcccctttgaagtcaaaggtagaaaaggaaatatcttcctataaaaactagacagaatgattctcagaaacttctttttgatgtgtgcgttcaactcacagagtttaacctttcttttcatagagcagttaggaaacactctgtttgtaaactctgcaagtggatattcagacctgtttgaggccttcgttggaaacgggatttcttcatactatgctagacagaagaattctcagtaacttccttgtgttgtgtgtattcaactcacagagttgaacgatcctttacacagagcggacttgaaacacactttttgtggaatttgcaagtggagatttcagccgcgttgaggtcaatggtagaaaaggaaatatcttcgtttcaaaactagacagaatgattctcagaaactcctttgtgatgtgtgcgttcaactcacagagtttcacttttcttttcatagagcagttaggaaacactctgtttgtaaagtctgcaagtggatattcagacctctttgaggccttcggtggaaacgggatttcttcatattatgctagacagaagaattcccagtaacttccttgtgttgtgtgtgttcaactcacagagttgaactttcatttacacagagcagatttgaaacactcttttcgtgaaatttgcaagtggagatttcaagcgctttgaggccaaaggcagaaaaggaaatatcttcgtataaaaactagacagaataattctcagaaactgctctgtgatgtgtgcgttcatctctcagagtttaactgttcttttcattcagcagtttggaaacactctgtttgtaaagtctgcacgtggatattttgaccacttagaggccttcgttggaaacgggtttttttcatgtaaggctagacagaagaattcccagtaacttccttgtgttgtgtacattcaactcacagagttgaacgttcccttagacagagcagatttgaaacactctttttgtgcaattggcaagtggagatttcaagcgctttaaggtcaatggcagaaaaggaaatatcttcgtttcaaagctagacagtatgattctcagaaacttctttgtgatgtgtgcgttcaactcacagagtttaacctttcttttcatagagcagttaggaaacactctgtttgtaaactctgcaagtggatattaagacctctttgaggccttcgttggaaacgggatttcttcatactgtgctagacagaagaattctcagtaacttccttgtgttgtgtgtattcaactcacagagttgaacgatcctttacacagagcggaattgaaacactctttttgtgaaacttgcaagtggagatttcagccgcgttgaggtcaatggtagaaaaggaaatctcttcgtataaaaactagacagagtgattctcagaaactcctttgtgatgtctgcgttcaactcaccgagtttaacctttcttttcatagagcagttaggaaacactctgtttgtaaagtctgcaagtggatattcagacctccttgaggccttcgttggaaacgggatttcttcatattctgctatacagaagaattcccagtaactttccttgtgttgtgtgtgttcaactcacagagttgaactttcatttacacagagcagatttgaaacactctttttgtggaatttgcaagtggagatttcaagcgctttgaggccaaaggcagaaaaggaaatatctccgtttcaaaactagacagaatcattctcagaaactgctctgcgatgtgtgcgttcaactctcagagtttaacttttcttttcattcagcagtttggaaacactctgtttgtaaagtctgcacgtggatattttgaccatttagaggccttcgttggaaacgggttttttttcttgtaaggctagacagaagaattcccaggaacttccttgtgttgtgtacattcaactcacagagttgaacgttcccttagacagagcagatttgaaacactctttttgtgcaattggcaagtggtgatttcagccgctttgaggtcaatggtagaaaaggaaatatcttcgtataaaaactagacagaatcattcccacaaactgcgttgtgatgtgttcgttcaactcacagagtttaacctttctgttcatagagcagttaggaaacactctgtttgtaaagtctgcaagtggatattcagacctctttgaggccttcgttggaaacgggatttcttcatattctgctagacagaagaattctcagtaacttcattgtgttgtgtgtattcaactcacagatttcaacgatcctttacacagagcagacttgaaacactctttttctggaatttgcaagtggagatttcagccgctttgaggtcaatggtagaataggaaatatcttcctatagacactagacagaatgattctcagaaactcctttatgatgtgtgcgttcaactcacagagtttaacctttctgttcatagagcagttaggaaacactctgtttgtaaagtctgcaagtggatattcagacctccttgaggccttcggtggaaacgggatttcttcatattctgctagacagaagaattctcagtaacttccttgtgttgtgtgtattcaactcacagagttgaacgatcctttacacagagcagacttgaaacactctttttgtggaatttgcaagtggagatttcagccgatttgagttcaatggtagaataggaaatatcttcctatagaaactagacagaatgattctcagaaactcctttgtgatgtgtgcgttcaactcatagagtttaacctttcttttcatagagcagttaggaaacactctgtttgtaaagtctgcaagtggatattcagacctctttgaggccatcgttggaaacgggatttcttcatattctgctagagagaagaattctcagtaacttccttgtgttgtgtgtattcaactcacagagttgaacgatcctttacacagagcagacttgaaactctctttttgtggaatttgcaagtggagatttcagccgctttgaggtcaatagtagaaaagtaaatatcttcgtagaaaaactagacagaatgattctcagaaactcttttgtgatgtgggcgttcaactcacagagtttaaccattcttttcatagagcagttaggaaacactctgtttgtaaagtctgcatgtggatatttggacttctttgaggccttcgttggaaacgggtttttttcatgtaaggctagacagaagaattctcagtaacttccttgtgttttgtgtattcaactcacagagttgaacgatcctttacacagagcagacttgaaacactctttttgtggaatttgcaagtggatatttcagccgctttgagttcaatggtagaataggaaatatcttcctatagaaactagacagaatgattctcagaaactcctttgtgatgtgtgcgttcaactcacagatttcaacctttcttttcatagagcagttgggaaacactctgtttgtaaagtctgcaagtggatattcagacttctttgaggccttcgttgaaagcgggatttcttcatattctgctagacagaagaattctcagtaacttccttgtgttgtgtgtattcaactcacagagttgcacgatcgtttacacagagcagacttgaaacactctttttgtggaatttgcaagtggagatttcagccgctttgaggtcaatagtagaaaaggaaatatcttcgtagaaaaactacacagaatgattctcagaaactcctttgtgatgtgggtgttcaactcacagagtttaacctttcttttcatagagcagttaggaaacactctgtttgtaaagtctgcaagtggatattttcacctctttgaggccttcattggaaacgggttttttttcatgtaaggctagacagaagaattctcagtaacttccttgtgttgtgtgtattcaactgacagagttgaactttcatttagacagagcagatttgaaacactctttttctggaatttgcaagtggagatttcaagcgctttgaggccaaaggcagaaaaggaaatatcttcgtataaaaactacacagaatcattctcagaaactgctctgcgatgtgtgcgttcaactctcagagtttaacttttcttttcattcagcagtttggaaacactctgtttgtaaagtctgcacgtggatattttgaccatttagaggccttcgttggaaacgggttttgtccttgtaagcctagacagaagaattcccagtaacttccttgtgttgtgtgcattcaactcacagagttgaacgttcccttagacagagcagatttgaaacactctatttgtgcaatttgcaagtgtagttttcaagctctttaaggtcaacggcagaaaaggaaatatcttggtttcaaaactagacagaatgattctcagaaactcctttgtgatgtgtgcgttcaactcacagagtttaaccttactgttcatagagcagttaggaaacactctgtttgtaaagtctgcaagtggatattcagacctctttgaggccttcgttggaaacgggatttcttcatattatgctagacagaagaattctcagtaacttccttgtgttgtgtgtattcaactcacagagttgaacgatcctttacacagagcagacttgaaacactctttttgtggaatttgcaagtggagatttcagccgctttgagttcaatggtagaataggaattatcttcctacagaaactagacagaatgattctcagaaactcctttgtgatgtgtgtgttcaactcacagagtttaagctttcttttcatagagcagttagtaaacactctgtttataatgtctgcaagtggatattcagacccctttgacgccttcgtttgaaacgggatttcttcatattatgctagacagaagaattctcagtaacttccttgtgttgtgtgtattcaactgacagagttgaactttcatttagagagagcagatttgaaacactgtttttgtggaatttgcaagtggagatatcaagcgccttggggccaaaggcagaaaaggaaatatcttcgtataaaaagtagacagaatgattctcagaaacttctttgtgatgtgtgcgttcaactcacagagtttaacctttcttttcatagagcagttaggaaacactctgtttgtaaactatgcaagtggatattcagacctctttgaggccttcgttggatacgggatttcttcatactatgctagacagaagaattctcagtaacttcccttgtgttgtgtgtattcaactcacagagttgaacgatcctttacacagagcagacttgaaacattctttttgtggaatttgcaaggggagatttcagccgctttgaggtcaatggtagaataggaaatatcttcctatagaaactagacagaatgattttcagaaactgctttgtgatgtgtgcgttcaactcacagagtttcacctttcttttcatagagcagttaggaaacactctgtttgtaaagtctacaagtggatattcagacctctttgaggccttcgttggaaacgggatttcttcatattatgctagacagaagaattctcagtaacttccttgtgttgtgtgtattcaactgacagagttgaactttcatttggagagagcagatttgaaacactgtttttttggaatttgcaagtggagatttcaagcgctttggggccaaaggcagaaaaggaaatatcttcgtataaaaactagacagaatcattctcagaaactgctctgtgatgtgtacgttcaactctcagcagtttaacttttcttttcattcagcagtttggaaacactctgttcgtaaagtctgcacgtggataatttgaccacttagaggccttcgttggaaacgggtttttttcatgtaaggctagacagaagaattctcagtaacttccttgtgttgtgtgtattcaactcacagaattgaacgatcctttacacagagcagacttgaaacactctttttgtggaatttgcaagtggagatttcagccgctttgaggtcaatagtagaaaaggaaatatcttcgtagaaaaactagacagaatgattctcagaaaatgttttgtgatgtgtgcgttcaactcacagagtttaacttttcttctcatagagcagttaggaaacactctgtttgtaaagtctgcaagtggatattgagacctctttgaggccttcgttggaaacgggatttcttcatattatgctagacagaagaattctcagtaacttccttgtgttgtgtgtattcaactgacagagttgaactttcatttagagagagcagatttgaaacactgtttttgtggaatttgcaagtggagatttcaagcgctttgaggtcaatggtagaataggaaatatcttcctatagaaactagacagaatcattctcagaaactgctgcgtgatgtgtgagttcaactctcagagtttaacttttcttttcattcagcggtttggaaacactctgtttgtaaagtctgcacgtggaaattttgaccacttagaggccttcgttggaaacgggttttcttcatgtaaggctagacagaagaattcccagtaacttccttgtgttgtgtacattcaactcacagagttgaacgttcccttagacagagcagatttgaaacactctttttgtgcaattggctagtgttgatttcagccgctttgaggtcaattgtataaaaggatatatcttcatataaaaactagacagaatgattctcagaaactcctttgtgatgtgtgcgttcaactcacagagtttaacctttctttccatagagcagttaggaaacactctgtttgtaaagtctgcaagtggatattcagacctctttgaggccttcgttggaaacgggtttttttcttataaggctagacagaagaattctcagtaacttccttgtgttgtgtgtattcaactcacagagttgaacgatcctttacacagagcagacttgaaacactctgtttgtggaatttgcaagtggagatttcagccgctttgaggtcaatagtagaaaaggaaatatcttcgtagaaaaactagacagaatgattctcagaaactcctttgtgatgtgtgcgttcaactcacagagtttaaactttcttttcatagagcagttaggaaacactctgtttgtaaagtctgcaagtggatattcagacctctttgaggccttcgttggaaacgggtttttttcatataaggctagacagaagaattcccagtaacttccttgtgttgtgtgtgttcaactcacagagttgaactttcatttacacagaaaagatttgaaacactctttttgtggaatttgcaagtggagatttcaagcgctttgaggccaaaggcagaaaaggaaatatctccgtttcaaaactagacagaatcattctcaaaaactgctctgcgatgtttgcgttcaactctcagagtttaacttttcttttcattcagcagtttggaaacactctgtttgtaaagtctgcacgtggataacttgaccacttagaggacttcgttggaaacgggtttttttcctgtaaggctagacagaagaattcccagtaacttccttgtgttgtgtacattcaactcacagagttgaacgttcccttagacagagcagatttgaaacactctttttgtgcaattggcaaatggagatttcaagcgctttaagttcaatggcagaaaaggaaatatcttcgtttcaaaactagacagaatcattctcagaaactgctctgcgatgtgtgcgttcaactctcagagtttaacttttcttttcatagagcagttaggaaacagtctgtttgtcaattctgtaagtggatattctgacatcttgtggccttcgttggaaacgggatttcttcatattctgctagacagaagaattctcagaatcttccttgtgttgtgtgtattcaactcacagatttgaacgatcctttacacagagcagacttgaaacactctttttgtggaatttgcaagtggagatttcagccgctttgaggtccatggtagaaaaggaaatatcttcgtataaaaactagacagaatgattctcagaaactcctttgtgatgtgtgcgttcaactcacagagtttaacctttcttttcatagagcagttaggaaacactctgtttgtaaagtctgcaagttgatattcagacctctttgaggccttcgttggaaacgggatttcttcatattatgctagacagaagaattctcagtaacttccttgtgttgtgtgtattcaactcacagagttgaacgatcctttacacagagcagacttgaaacactctttttatggaatttgcaagtggagatttcagccgctttgaggtcaatggtagaaaaggaaatatcttcgtataaaaactagacagaatgattctcataaactcctttgtgatgtgtgcgttcaactcacagagtttaacctttcttttcatagagcagttaggaaacactctctttgtgaagtctgcaagtggatattcagacctccttgaggccttcgttggaaacgggatttcttcatattctgctagacagaagaattctcagtaacttccttgtgttgtgtttattcaactcacagagttaatgatcctttacacagagcagacttgaaacactctttttgtggcatttgcaagtggagatttcagccgctttgaggtcaatggtagaaaagtaaatatcttcgtataaagactagacagaatcattctcagaaactgctctgcgatgtgtgcgttcaactctcagagttcaacttttcttttcattcagcagtgtggaaacactctgtttgtaaagtctgcacgtggatattttgaccacttagaggcctttgttggaaacgggtttttttcctgtaaggctagacagaagttttcccagtaacttccttgtgttgtgtacattcaactcacagagttgaacgttcccttagacagagcagatttgaaacactctttttgtgcaattggcaaatggagatttcaagcgctttaaggtcaatggcagaaaaggaaatatcttcgtttcaaaactagacagaatcattcccacaaactgcgttgtgatgtgttcgttcaactcacagagtttaacctttctgttcatagagcagttaggaaacactctgtttgtaaagtctgtaagtggatattctgacatcttgtggccttcgttggaaacgggatttcttcatattatggtagacagaagaattctcagtaacttccttgtgttgtgtgtattcaactcacagagttaaacgatcctttacacagagcagacttgaaacactctttttgtggaatttgcaagtggagatttcagccgctttgaggtcaatggtagaaaaggaaactatcttcatataaacactagacagaatgattctcagaaactcctttgtgatgtgtgtgttcaactcacagagtttaacctttcttttcatagagcagttagtaaacactctgtttataaagtctgcaagtagatattcagacccctttgaggccttcgttggaaacgggatttcttcatattatgctagacagaagaattctcagtaacttcccttgtgttgtgtgtattcaactcacagagttgaacgatcctttacacagagcagagttgaaacattctttttgtggaatttgcaagtggagatttcagccgctttgaggtcaatggtagaatagcaaatatcttcctatagaaactagacagaatgattctcagaaactcctttgtgatgtgtgcattcaactcacagagtttaacctttcttttcatagaacagttaggaaacactctgtttgtaaagtcttcaggtggatattcagacctcttagaggccttcgttggaaacaggatttcttcatattatgctagacagaagaattctcagcaatcttccttgtgttgtgtgtattcaactcacagagttgaacgatggtttacacagagcagatttgaaacactctttttgtggaatttgcaagtggagatttcagccgctttgaggtcaatggtagaaaaggaaatatcttcctataaaaactagacagaatgattctcagaaactcctttgtgatgtgtgcgttcaactcacagagtttcacttttcttttcatagagcagttacgaaacactctgtttgtaaagtcttcaagtggatattcagacctctttgaggccttcgttggaaacgggatttcttcatattctgctacacagaagaattctcagtaacttccttgtgttgtgtgtattcaactcacagagttgaacgatcctttacacagagcagacttgaaacactctttttgtggaatttgcaagtggagatttcagccgctttgaggtcaatggtagaaaaggaaactatcttcatataaagactagactgaatcattctcagaaactgctctgtgatgtgtgcattcaactctcagagtttaacttttcttttcattcagcagtttggaaacactctgtttgtaaagtctgcacgtggataatttgaccacttagaggccttcgttggaaacgggtttttttcatgtaaggctagacagaagaattctcagtaacttccttgtgttgtgtgtattcaactcacacagttgaacgatcctttacacagagcagacttgtaacacactttttgtggaatttgcaagtggagatttcagccgctttgaagtcaaaggtagaaaaggaaatatcttcctataaaaactagacagaatgattctcagaaactcctttgtgatgtgtgcgttcaactcacagagtttaacctttcttttcatagagcagttaggaaacactctgtttgaaaagtctgcaagtggatattcagacctcttagaggccttcgttggaaacgggatttcttcatattatgctagacagaagaattttcagtaacttccttgtgtagtgtgtattcaactcacagagttgaacgatcctttacacagagcagacttgaaacactctttttgtggaatttgcaagtggagatttcagccgctttgaggtcaatggtagaaaaggaaatatcttcgtataaagacaagacagaatgattctcagaaactcctttgtgatgtgtgcgttcaactcacagagtttaacctttcttttcatagagcacttaggaaacactctgtttgtaaagtctgcaagtggatattcagacctctttgaggccatcgttggaaacgggatttcttcatattctgctagacagaagaattctcagtaacttccttgtgttgtgtgtattcaactcacagagttgaacgatcctttacacagagcagacttgaaacactctttttgtggaatttgcaagtggagatttcacccgctttgaggtcaatggtagaaaaggaaatatcttcgtataaagactagactgaatgattctcagaaactcctttgtgatgtgtgcgttcaactcacagagtttaacctttcttttcatagagcagttaggaaacactctgtttgtaaagtctgcaagtggatattcagacctccttgaggccttcattggaaacaggatttcttcatattctgctagacagaagaattctcagtaacttccttgtgttgtgtgtattcaactcacagagttgaacgatcctttacagcagagcagacttgaaacactctttttgtggaatttgcaagtggagatttcagccgctttgaggtcaatggtagaaaaggaaatatcttcctataaagactagacagagtgattctcagaaactcctttgtgatgtctgcgttcaactcacagagtttaacctttcttttcatagagcagttaggaaacactctgtttgtaaagtctgcaagtggatattcagaccttcttgaggccttcgttggaaacgggatttcttcatattatgctagacagaagaattctcagtaacttccttgtgttctctgtattcaactcacagagttgaacgatcctttacagagagcagacttgaaacactctttttgtggaatttgcaagtggagatttcagccgctttgaggtcaatggtagaaaaggaaatatcttcgtataaagactagacagaatgattctcagaaactcctttgtgatgtgtgcgttcaactcacagagtttaacctttgttttcatagagcagttaggaaacactctgtttgtaaagtctgcaagtggatattcagacatctttgaggccttcgttggaaacgggatttcttcatgttctgctggacagaagaattctcagaatcttccttgtgttgtgtgtcttcaagtcacagagttgaacaatggtttacacagagcagatttgaaacactctttttgtggaatttgcaagtggagatttcagccgctttgaggtcaatggtagaaaaggaaatatcttcgtataaaaactagacagaatgattctcagaaactcctttatgatgtgtgcgttcaactcacagagtttaacctttcttttcatagagcagttaggaaacactctgtttgtaaactctgcaagtggatattcagacctctttgaagccttggttggaaacgggatttcttcatattatgcctgagagaagaattctcagtaactgccttgtgttgtgtgtattcaactcacagagttgaatgatcctttacacagagcagacttgaaacactccttttgtggaatttgcaagtggagatttcagccgctttgaggtcaatggtagaataggaaatatcttcctatagaaactagacagaatgattctcagaaactcctttgtgatgtgtgtgttcaactcacagagtttaacctttcttttcatggagcagttaggaaacactctgtttgtaaagtctgcaaggggatattcagacctctttgaggcttccgttggaaacgggatttcttcatattctgctagacagaagaattctcagtaacttcattgtgttgtgtgtattcaactcacagagttgaacgatcctttacacagagcagacttgaaacactctttttgtggaatttgcaagtggagatttcagccgctttgaggtcaatggtagaaaaggaaatatcttcgtataaagactagacagaatgattctcagaaactcctttgcgatgtgtgcattcaactcacagagtttaacctttcttttcacagagcagttaggaaacactctgtttgtaaagtctgcaagtggatattcagacctccttgaggccttcgttggaaacgggatttcttcatattatgctagacagaagaattctcagaaacttccttgtgttgtgtgttttcaactcacagagttgaacgatggtttacacagagtagacttgaaacactctttttgtgtaatttgcaagtggagatttcagccgctttgaggtcaatggtagaaaaggaaatatcttcgtataaaaagtagacagaatgattctcagaaactcctttgtgatgtgtgcgttcaactcacagagtttaacttttcttttcatagagcagttaggaaacactctgtttgtaaaatctgcaagtggatattcagacctctttgaggccttcgttggaaacgggatttcttcatattatgctagacagaagaattcccagtaacttccttgtgttgtgtgtgttcaactcacagagttgaactttcatttacacagagcagatttgaaacactctttttgtggaatttgcaagtggagatttcaagcgctttgaggccaaaggtagaaaaggaaatatcttcgtataaaaactagacagaatcattctcagaaactgctgcgtgatgtgtgcgttcaactctcagagtttaacttttcttttcattcagcggtttggaaacactctgtttgtaaagtctgcacgtggatattttgaccacttagaggccttcgttggaaacgggtttcttgcatgtaaggctagacagaagaattcccagtaacttccttgtgttgtgtgtattcaactcacagagttgaacgttcccttagacggagcagatttgaaacactctatttgtgcaatttgcaagtgtagatttcaagcgctttaaggtcaatggcagaaaaggaaatatcttcgtttcaaaactagacagaatcattcccacaaactgcgttgtgatgtgttcgttcaactcacagagtttaacctttctgttcatagagcagttaggaaacactctgtttgtaaagtctgtaagtggatattctgacatcttgtggccttcgttttaaacgggatttcttcatattgtgctagacagaagaattctcagtaacttccttgtgttgtgtgtattcaactcacagagttgaactatcctttacagagagcagacttcaaacactctttttgtggaatttgcaattggatatttcagccgctttgaggtcaatggtagaaaaggaaatatcttcgtataaagactagacagaatgattctcagaaaatcttttgtgatgtgtgcgttcaactcacagagtttaacttttcttctcatagagcagttaggaaacactctgtttgtaaagtctgcaagtggatattcagacctctttgaggccttcgttggaaacgggattttttcatattatgctagacagaataattctcagtaacttccttgtgttctgtgtattcaactcacagagttgaacgatcctttacagagagcagacttgaaacactctatttgtggaatttgcaagtggagatttcagccgcattgaggtcaatggtacaaaaggaaatatcttcgtataaagactagacagaatgattctcagaaactcctttgtgatgtgtgcgttcaactcacagagtttaacctttcttttcatagagcagttaggaaacactctgtttctaaagtctgcaagtggatattcagacatccttgaggctttcgttggaaacgggatttcttcatattctgctagaaagaagaattctcagtaacttccttgtgttgtgtgtattcaactcacagtgttgaacgatcctttacacagagcagacttgaaacactctttttgtggaatttgcaagtggagatttcagccgctttgagttcaatggtagaataggaaatatcttcttatagaaactagacagaatgattctcagaaactcctttgtgatgtgtgcgttcaactcacagagttcaacctttcttttcatagagcagttgggaaacactctgtttgtaaagtctgcaagtggatattcagatttctttgaggccttcgttggaagcgggatttcttcatgttctgctagacagaacaattctcagtaacttccttgtgttgtgtgtattcaactcacagagttgaacgatcctttacacagagcagacttgaaacactctttttgtggaatttgtaagtggagatttcagccgctttgaggtcaatagtagaaaaggaaatatattcgtagaaaaactagacagaatgattctcataaactcctttgtgatgtgtgcgttcaactcacagagtttaacctttcttttcatagagcagttaggaaacactctgtttgtaaagtctgcaagtggatattcagacctcgttgaggccttcgttggaaacgggatttcttcatattctgctagacagaagaattctcagtaacttccttgtgttgtgtgtattcaactcacagagttgaacgatcctttacacagagcagactttaaatactctttttgtggaatttgcaagtggagatttcagccgctttgagttcaatggtagaataggaaatatcttcctatagaaactagacagaatgattctcagaaactcctttgtgatgtgtgcgttcaactcacagagtttaacctttcttttcatagagcagttaggaaacactctgtttgtatagtctgcaagtggatattcagacctctttgaggccttcgttggaaacgggtttttttcatataaggctagacagaagaattctcagtaacttccttgtgttgtgtgctttcaactcacagagttcaacgatcctttacacagagcagattagaaacactctttttgtggaatttgcaagtggagatttcagccactttgaggtcaatggtagaaaaggaaatatcttcgtataaaaactagacagattgattctcagaaaatcttttgtgatgtgtgcgttcaactcacagagtttaacttttcttctcatagagcagttaggaaacactctgtttgtaaagtctgcaagtggatattcagacctctttgaggccttcgttggaaacgggatttcttcatattatgctagacagaagaattctcagtaactttccttgtgttgtgtgtattcaactcacagagtagaacgatcctttacacagagcagacttgaaacactctttttgtggaatttgcaagtggagatttcaagcgctttgaggccaaaggcagaaaaggaaatatcttcgtataaaaactagacagaatgattctcagaaactcctttgtgatgtgtgcgttcaactcacagagttgaagttttcttttcttagagcagttaggaaacactctgtttgtaaagtctgcaagtggatattcagaactctttgaggccttcgttggaaacggggtttcttcatattctgctagacagaagaattctcagtaacttccttgtgttgtgtgtattcaactcacagagttgaacgatcctttacacagagcagacttgaaacattctttttgtggaatttgcaactggagatttcagccgctttgaggtcaacggtagaataggaaatatcttcctatagaaactagacacaatgattctgagaaactcctttgtgatgtgtgcgttcaactcacagagtttaacctttcttttcatagagcagttaggaaacactctgtttgtaaagtctgcaagtggatattcagacctccttgaggccttcgttggaaacgggatttcttcatattatgctagacacaataattctcaagtaacttccttgtgttgtgtgtattcaactcacagagttgaacgatcctttacagagagcagacttgaaacactctttttgttgaatttgcaagtggagatttcagccgctttgaggtcaatggtagaaaaggaaactatcttcgtataaagactagacagaatgattgtcagaaactcctttgtgatgtgtgcgttcaattcacagagtttaacctttcttttcatagagcagttaggaaacactctgtttgtaacgtctgcaagtggatattcagacatctttgaggctttcgttggaaacgggatttcttcatattctgctatacagaagaattcccagtaacttccttttgttgtgtgtgttcaagtcacagagatgaactctcatttacacagagcagatttgaaactctctttttgtggaatttgcaaatggagatttcaagcgctttgaggccaaaggcagaaaaggaaatatcttcctataaaaactagacagaatcattctcagaaacagctctgtgatgtgtgcgttcaactctcagagtttaacttttcttttcattcagcagtttggaaacactctgtttgtaaagtctgcacgtggatattttgaccacttagaggccttcgttggaaacgggttttttttcacgtaaggctagacggtagcattcccagtaacttccttgtgttgtgtgcattcaactcacagagatgaacgttcccttagacagagcagatttgaaacgctctatttgtgcaatttgcaagtgtagatttcaagcgctttaaggtcaatggcaaaaaaggaaatatcttcgtttcaaaactagacagaatcattcccacaaactgcgttgtgatgtgttcgttcaactcacagagtttaacctttctgttcatagagcagtgaggaaacactctgtttgtaaactctgtaagtggatattctgacatcttgtggccttcgttggaaaagggatttcttcatattctgctagactgaagaattctcagtaacttccttgtgttgtgtgtattcaactcacagaattgaacgatcctttacacagagcagacttgaaacactctttttgtggaatttgcaagtggagatttcagccgctttgaggtcaatggtagaaaaggaaatatcttcgtatggaaacaagacagaatgattctcagaaactcctttgtgatgtgtgcgttcaactcacagagtttaacctttcttttcatagagcagttgggaaacactctgtttgtaaagtctgcaagtggatattccgacatccttgaggctttcgttggaaatgggatttcttcatattctgctagaaagaagaattctcagtaacttccttgtgttgtgtgtattcaaaggacagagttgaactttcatttagagagagcagatttgaaacactgtttttgtggaatttgcaattggagatttcaagcgctttggggccaaaggcagaaaaggaaatatcttcgtataaaaactagacagaatcattctaagaaactgctgcgtgatgtgtgcgttcaactctcagagtttaacttttcttttcattcagcggtttggaaacactctgtttgtaaagtctgcacgtggatattttgaccacttagaggccttcgttggaaacgggtttttttcatgtaaggctagacagaagaattcccagtaacttccttgtgttgtgtacattcaacacacagagttgaacgttcccttagacagagcagatttgaaacactctttttgtgcaattggcaagtggagatttcaagcgctttaaggtcaatggcagaaaaggaaatatcttcgtttcaaaactagacagaatgattctcagaaactcctttgtgatgtgtgcgttcaactcacagagtttaacctttcttttcatagagcagttaggaaacactctgtttgtaaagtctgcaagtggatattctgacctctttgaggccttcgttggaaacgggatttcttcatattctgctagacagaagaattctcagtaacttccttgtgttgtgtactttcaactcacagagttgaacgttcctttacacagagcagattagaaacactctttttgtggaatttgcaagtggagatttcagccgctttgaggtcaatggtagaaaaggaaatatcttcataaaaaaactagacagaatgattctcagaaactcctttgtgatgtgtgcgttcaactcacagagtttaacctttcttttcatagagcagttaggaaacactccgtttgtaaagtctgcaagtggatattcagacctccttgaggccttcgttggaaacgggatttcttcatattatgctagacagaagaattctcagtaacttccttgtgttgtgtgtattcaactcacagagttgaacgatcctttgcacagagcagacttgaaacactctttttgtggaatttgaaagtggagatttcagccgctttgaggtcaatggtagaataggaaatatcttcctatagaaactagacagaatgattctcagaaactcctttgtgatgtgttcgttcaactcacagagttcaacttttcttttcatagagcagttgggaaacactctgtttgtacagtctacaagtggatattcagacctctttgaggccttcgttggaaacgggatttcttcatattctgcaagacagaagaattctcagtaacttccttgtgttgtgtgtattcaactcacagagttgaacgatcctttacacagagtagacttgaaacactccttttgtggaatttgcaagtggagatttcagccgctttgaagacaatggtagaataggaaatatcttcctatagaaactagacagaatgattctcagaaactcctttgtgatgtgtgcgttcaactcacagagtttaacttttgttttcatagagcagttaggaaacactctgtttgtaaagtcttcaagtggatatacagacctctttgaggccttcgttggaaacgggatttcttcatattctgctagacagaataattctcagtaacttccttgtgttgtgtgtattcaacccacagagttgaacgatcctttacagagagcagacttgaaacactctttttgtggaatttgcaagtggagatttcagccgctttgggtcaatggtagaataggaaatatcttcctatagaaactagacagaatgattctcagaaactcctttgtgatgtgtgtgttcaactcacagagtttaacctttcttttcatagagcagttagtaaacactctgtttataaagtctgcaagtggatattcagacccctttcaggccttcgttggaaacgggatttcttcatattctgctagacagaagaattcccagtaacttcccttgtgttgtgtgcattcaactcacagagttgaacgttcccttagacagagcagatttgaaacactctatttgtgcaatttgcaaatgtagatttcaagcgctttaaggtcaatggcagaaaaggaaatatcttcgtttcaaaactagacagaatcattcccacaaactgcgttgtgatgtgttcgttcaactcacagagtttaacctttctgttcatagagcagctaggaaacactctgtttgtaaagtctgtaagtggatattctgacatcttgtggccttcgttggaaacgggatttcttcatattctgctagacagaagaattctcagaatcttccttgtgttgtgtctattcaactcacagagttgaacgatcctttacacagagcagacttgaaacactctttttgtggaatttgcaagtggagatttcagccgctttgaggtccatggtagaaaaggaaatatcttcgtataaaaactagacagattgattctcagaaactcctttgtgatgtgtgcgttcaactcacagagtttaacctttcttttcatagagcagttaggaaacactctgtttgtaaagtctgcaagtggatattcagacctctttgaggccttcgttggaaacgggatttcttcatattctgctagacagaagaattctcagtaacttccttgtgttgtgtgtattcaactcacagagttgaacgatcctttacacagagcagacttgtaacactctttttgtggaatttgcaagtggagatttcagccgctttgaagtcaaaagtagaaaaggaaatatcttcctataaaaactagacagagtgattctcagaaactccttcgtgatgtctgcgttcaactcacagagtttaacctttcttttcatagagcagttaggaaacactctgtttgtaaagtctgcaagtggatattcagacctccttgaggccttcgttggaaacgggatttctacatattatgctagacagaagaattctcagtaacttccttgtgttgtgtgtattcaactgacagagttgaactttcatttagagagaggagatttgaaacactgtttttgtggaatttgcaagtggagatttcaagcgctttggggccaaaggcagaaaaggaaatatcttcgtataaaaactagacagaatcattctcagtaactgctctgtgatgtgtgcgttcaactctcagagtttaacttttcttttcattcaccagtttggaaacactcagtttgtaaagtctgcacgtggatattttgaccacttaggggtcttcgttggaaacgggtttttttcatgtaaggctagacagaagaattcccagtaacttccttgtgttgtgtgcattcaactcacagagttgaacgttcccttaggcagagcagatttgaaacactctatttgtgcaatttgcaagtgtagatttcaagcgctttaaggtcaacggcagaaaaggaaatatcttcgtctcaaaactagacagaatcattcccacaaactgcgttgtgatgtgttcgttcaactcacagagtttaacctttctgttcatagagcagttaggaaacactctgtttgtaaagtctgtaagtggatattctgacatcttgtggccttcgttggaaacgggatttcttcatagtctgctagacagaagaattctcagtaacttccttgtgttgtgtgtattcaactcacagagttgaacgatcctttacacagagcagacttgaaacactctttttgtggaatttgcaagtggagttttcagccgctttgaggtcaatggtagaataggaaatatcttcctatagaaactagacagaatgattctcagaaactcctttgtgatgtgtgcgttcaactcacagagtttaacttttcttttcatagagccgttaggaaacactctgtttgtaaagtctgcaagtggatattcagacctctttgaggccttctttggaaaagggatttcttcatattatgctagacagaagaattctcagcaacttccttgtgttgtgtgtattcaactcacagagttgaacgatcctttacacagagcagacttgtaacactctttttgtggaatttgcaagtggagatttcagccgctttgacgtcaaaggtagaaaaggaaatatcttcctataaaaactagacagaatgattctcagaaactcctttgtgatgtgtgcgttcaactcacagagtttaacctttcttttcatagagcagttagggaacactctgtttgtaaagtctgcaagtggatattcagacctctttgaggcctacgtaggaaacgggatttcttcatattatgctagacagaagaattctcagaaacttccttgtgttgtgtgtattcaactcacagagttgaacgatcctttacacagagcagacttgaaacactctttttctggaatttgcaagtggagatttcagccgctttgaggtcaatggtagaataggaaatatcttcctatagatactagacagaatgtttctcataaactcctttgtgatgtgtgcattcaactcaaagactttaacctttcttttcatagagcagttaggaaacactctgtttgtaaagtctgcaagtggatattcagacctccttgaggccttcgttggaaacgggatttcttcatattctgctagacagaagaattctcagtaacttccttgtgttgtgtgtattcaactcacagagttgaacgatcctttacacagagcagacttgaaacactctttttgtggaatttgcaagtggagatttcagccgctttgaggtcaatggtagaataggacatatcttcctatagaaactagacagaatgattctcagaaactcctttgtgatgtgtgcgttcaactcacagagtttaaccttactgttcatagagcagttaggaaacactctgtttgtaaagtctgcaagtggatattcagacctccttgaggccttcgttggaaacgggatttcttcatattctgctagacagaagaactctcagaatcttccttgtgttgtgtgtattcaacgcacagagttgaacgatcctttacacagagcagacttgaaacactctttttgtggaatttgcaagtggagatttcagccgctttgaggtccatggtagaaaaggaaatatcttcgtataaaaactagacagaatgattctcagaaacttcattgtgatgtgtgcgttcaactcacagagtttaacctttcttttcatagagcagttaggaaacactctgtttgtaaagtctgcaagtggatattcagacatccttgaggctttcgttggaaacgggatttcttcatattctgctagaaagaagaattctcagtaacttccttgtgttgtgtgtattcaactcacagagttgaacgatcctttacacagagcagacttgaaacactgtttttgtggaatttgcaagtggagatttcagccgctttgaagtcaatggtagaataggaaatatcttcctatagaaactagacagaatgattctcagaaactcctttgtgatgtgtgcgttcaactcacagagtttaacctttcttttcatagagcagttaggaaacactctgtttgtaaagtctgcaagtggatattcagacctccttgaggccttcgttggaagcgggatttcttcatgttcaggtagacagaagaattctcagtaacttccttgtgttgtgtgtattcaactcacagagttgaacgatcctttacacagagcagacttcaaacactctttttgtggaatttgcaagtggagatttcagccgctttgaagtcaatggtagaataggaaatatcttcctatagaaactagacagaatgattctcagaaactcctttgtgatgtgtgcgttcaactcacagagtttaacctttcttttctcagagcagttaggaaacactctgtttgtaaagtctgcaagtggatattcagacatctttgaggctttcgttggaaacggggtttcttcatattctgctagacagaagaattctcagtaacttccttgtgttgtgtgtattcaactcacagagttgaacgatcctttacacagagcatacttgaaacactctttttgtggaatttgcaagtggagatttcagccgctttgaggtcaatggtagaataggaagtatctccctatagaaactagacagaatgattctcagaaactcctttgtgatgtgtgcgttcaactcacacagtttaacctttcttttcatagagctgttaggaaacactctgtttgtaaagtctgcaagtggatattcagacctccttgaggccttcgttggaaacgggatttcttcatattatgctagacagaagaattcccagtaacttccatgtgttgtgtgtgttcaactcacagagttgaaatttcatttacacagagcagatttgaaacactctttttgtggaatttgcaaatggagatttcaagcggtttgaggccaaaggcagaaaaggaaatatcttcgtataaaaactagacagaatcattctcagaaactgctctgtgatgtgtgcgttcaactctcagagtttaactttccttttcattcagcagtttggaaacactctgtttgaaaagtctgctgctggataatttgaccactgagaggccatcgttggaaacgggttttttccatgtaacgctagacagaagaattctcagtaacttccttgtgttgtgtgtattcaactcacagagttgaacgatcctttacacagagcagacttgaaacactctttttgtagaatttgcaagtggagatttcagccgctttgaggtcaatggtagaataggaaatatcttcctttagaaactagacagaatgattctcagaaactcctttgtgatgtgtgcgttcaactcacagagtttaacttttcttttcatagagcagttaggaaacactctgtttgtaaagtctgcaagtggatattcagacatctttgaggctttcgttggaaacgggatttcttcatattctgctatacagaagaattcccagtaactttccttgtgttgtgtgtgttcaacttacagagttgaactttcatttacacagagcagatttgaaacactctttttgtggaatttgcaagtggagatttcaagcgctttgaggccaaaggcagaaaaggaaatatcttcgtataaaaactagacagaatcattctcagaaactgctctgtgatgtgtgcgttcaactctcagagtttaacttttcttttcattcagcaatttggaaacactctgtttgtaaggtctgcacgtggataatttgaccacttagaggccttcgttggaaacgggtttttttcatgtaaggctagacagaagaattcccagtaacttccttgtgttgtgtacattcaactcacagagttgaacgttcccttagacagagcagatttgaaacactctttttgtgcaattggcaaatggagatttcaagcgctttaaggtcaatggcaggaaaggaaatatcttcgtttcaaaactagacagaatcattcccacaaactgcgttgtgatgtgttcgttcaactcacagagtttaaactttcttttcatagagcagttaggaaccagtctgtttgtaaattctgtaagtggatattctgacatcttgtgaccttcgttggaaacgggatttcttcatattctgctagacagaagaattctcagtaacttcattgtgttgtgtgtattcaactcacagagttcaacgatgctttacacagagtagacttgaaacactcttgttgtggaatttgcaagtggagatttcagccgctttgaggtcaatggtagaataggaaatatcttcctatagaaactagacagaatgattctcagaaactcctttgtgatgtgtgcgttcaactcacacagtttaacctttgttttcatagagcagttaggaaacactctgtttgtaaagtctgcaagtggatattcagacctccttgaggcattcgttggaaacgggatttctacatattatgctagacagaagaattctcagtaacttccttgtgttgtgtgtattccactcacagagttgaacgatcctttacacagagcaggcttgtaacactctttttgtggaattttcaagtggagatttcagccgctttgaagtcaaaggtagaaaaggaaatatcctcctataaaaactagacagaatgattctcagaaactcctttgtgatgtgtgcgttcaactcacagagtttaacctttctgttcatagagcagttaggaaacactctgtttgtaaagtctgcaagtggatattcagacctctttgaggccttcgttggaaacgggatttcttcatattatgctagaccgaagaattcccagtaacttccttgtgttgtgtctgttcaactcacagagttgaactttcatttacacagagcagatttgaaacactctttttctggaatttgcaagtggagatttcaagcgctttgaggccaaaggcagaaaaggaaatatcttcgtataaaaactagacagaatcattctcagaaactgctctgcgatgtgtgcgttcaactctcagagtttaacttttcttttcattcagcagtttggaaacactctgtttgtaaagtctgcacgtggatattttgaccacttagaggccttcgttggaaacgggtttttttcctgtaagcctagacagaagaattctcagtaacttccttgtgttgtgtgtattcaactcacacagttgaacgatcctttacacagagcagacttgtaacactctttttgtggaatttgcaagtggagatttcagccgctttgaagtcaaatgtagaaaaggaaatatcttcctataaaaactagacagaatgattctcagaaacttctttgtgatgtgtgcgttcaactcacagagtttaacctttcttttcatagagcagttaggaaacactctgtttgtaaactctgcaagtggatatacagacctctttgaggccttcgttggaatcgggatttcttcatactatgctagacagaatatttctcagtaacttctttgtgtcgtgtgtatgcaactcacagagttcaaccttccttcagacagagcagatttgaaacactctttttgtggaatttgcaagtcgagatttcaagcgctttgaggccaaaggcagaaaaggaaatactttcgtataaaaactagacagaatcattctcagacactgctgcatgatgtgtgcgttcaactctcagagtttaacttttcttttcattcagcggtttggaaacactctgtttgtaaagtctgcacgtggatattttgaccacttagaggccttcgttggaaacgggtttttttcatgtaaggctagacagaaagaattcccagtaacttccttgtgttgtgtgcattcaactcacagagttgaacgttcccttagacagagcagatttgaaacactctatttgtgcaatttgcaagtgtagttttcaagctctttaaggtcaacggcagaaaaggaaatatcttcgtttcaaaactagacagaatcattcccacaaactgcgttgtgatgtgttcgttcatctcacagagtttaacttttctgttcatagagcagttaggaaacaccctgtttgtaaagtctgcaagtggatattcagacctccttgaggccttcgctggaaacgggatttcttcatattctgctagacagaagaattctcagtaaattccttgtgttgtgtgtattcaactcacagagttgaacgatcctttacacagagcagacttgaaacactctttttgtggaatttgcaagtggagatttcagccgctttgaggtcaatggtagaataggaaatatcttcctatagaaactagacacaatgattctcagaaactcctttgtgatgtgtgtgttcaactcacagagtttaacctttcttttcatagagcagttaggaaacactctgtttgtaatgtctgcaagtggatattcagacctctttgaggccttcgttggaaacgggttttttcatataaggctagacagaagaattctcagtaacttccttgtgttgtgtgtattcaactgacagagttgaactttcatttagagagagcagatttgaaacactgtttttgtggaatttgcaagtggagatttcaagtgctttggggccaaaggcagaaaaggaaatatcttcgtataaaaactagacagaatcattctcagaaactgctctgcgatgtgtgcgttcaactctcagagtttaacttttcttttcattcagcagtttggaaacactctgtttgtaaagtctgcacgtggatattttgaacatttagaggccttcgttggaaacgggtttttttcctgtaaggctagacagaataattctcagtaacttccttgtgttgtgtgtattcaactcacagagttgaacgatcctttacagagagcagacttgaaacactctttttgtggaatttgcaagtggagatttcagccgctatgaggtcaatggtagaaaaggaaatatcttcgtataaagactagacagaatgattctcctaaactccttcgtgatgtgtgcgttcaaatcacagagttgaacttttcttttcatagagcagttaggaaacactctgtttatatagtctgcaagtggatattcagacccctttgaggccttcgttggaaacgggatttcttaatattatgctagacagaagaattcccagtaacttccttgtgatgtgtgtgttcaactctgtgagttgaactttcatttacacagagcagatttgaaacactctttttgtggaatttgcaaatggagatttcaagcgctttgaggccaaaggcagaaaaggaaatatcttcgtataaaaactagacagaatgattctcagaaactcctttgtgatgtatgcgttcaactcacagagtttaacctttcttttcatagagcagttaggaaacactctgtttgtaaagtctgcaagtggatattcagacctccttgaggccttcgttgaaaacgggttttcttcatattatgctagacagaagaattctcagtaacttccttgtgttgtgtgtattcaactcacagagttcaatgatcctttacacagagcagacttgaaacactctttttgtggaatttgcaattggggatttcagccgctttgaggtcaatggtagaaaaggaaatatcttcgtataaaaactagacagaatgattctcagaaactcctttgtgatgtgtgcgttcaactcacagaatttaaccttccttttcatagagcagttgggaaacactctgtttgtaaagtctgcaagtggatattcagacctctttgaggccttcgttggaaacgggatttcttcatattctgctagacagaagaattctcagtaacttccttgtgttgtgtgtattcaactgacagagttgaactttcatttagacagagcagatttgaaacactctttttgtggaatttgcaagtggagatttcaagcgctttgaggccaaaggccgaaaaggaaatatcttcgtataaaaactagacagaatcattctcagaaactgctctgcgatgtgtgcgttcaactctcagagtttaacttttcttttcattcagcagtttggaaacactctgtttgtaaagtctgcacgtggatattttgaccacttagaggccttcgttggaaacgggttttttcctgtaaggctagacagaagaattctcagtaacttccttgtgttgtgtgtattcaactcacagagttgaacgatcctttacacagagcagacttgaaacactctttttgtggaatttgcaagtggagatttcagccgctttgaggtcaacggtagaataggaaatatcttcctaaagaaactagacagaatgattctcagaaactcctttgagctgtgtgcgttcaactcacagagtttaacctttcttttcatagagcagttaggaaacactctgtttgtaaagtctgcaagtggatattcagacatctttgaggctttcgttggaaacgggttttcttcatattctgctagacagaagaattctcagaaacttcctggtgttgtgtgttttcaactcacagagttcaacgatcctttacacagagtagacttgaaacactctttttgtggaattggcaagtggagatttcagccgctttgaggtcaagggtagaaaaggaaatatcttcgtacaaaaactagacagaatgattctcagcaaactcctttgtgatgtgtgcgttcaactcacagagttcaacctttcttttcatagagcagttgggaaacactctgtttgtaaagtctgcaagtggatattcagacttctttgaggccttcgttggaagcgggatttcttcatattctgctagacagaagaattcccagtaacttccttgtgttgtgtgtgttcaactcacagagttgaactttcatttacacagagcagattggaaacactctttttgtggaatttgcaagtggagatttcaagcgctttgaggccaaaggcagaaaaggaaatatcttcagtataaaaattagacagaatcattctcagaaaccgctctgtgatgtgtgcgttcaactctcagagtttaacttttcttttcattcagcagtttggaaacactctgtttgtaaagtctcctcgtggatattttgaccacttagaagccttcgttggaaacgtgttttttttcatgtaaggctagacagaagaattcccagtaacttccttttgttgtgtgcattcaactcacagagatgaacgttcccttagacagagcagatttgaaacactctatttgtgcaatttgcaagtgtagatttcaagcgctttaaggtcaatggcagaaaaggaaatatcttcgtttcaaaactagacagaattattcccacaaactgcgttgtgatgtgttcgttcaactcacagagttaaacctttcttttcatagagcagttaggaaacagtctgtttgaaaattctgtaagtggatattctgacatcttgtggccttcgttggaaacgggatttcttcatattctgctagacagaagaattctcagaatcttccctgtgttgtgtgtattcaactcacagagttgaacgatggtttacacagagcagatttgaaacactcatttggtggaatttgcaagtggagatttcagccgctttgaggtcaatggtagaaaaggaaatatcttcgtataacaactagacagaatgattctcagaaaatcttttgtgatgtgtgcgttcaactcacaaagtttaacttttcttctcatagagcagttaggaaacactctgtttgtaaagtctgcaagtgtatattcagacctactttgaggccttcgttggaaacgggatttcttcatattatgctagacagaagaattctcagtaacttccttgtgttgtgtgtattcaactcacagagttgaatgatcctttacacagagcagacctgaaacactctttttgtggaatttgcaagtggagatttcagctgctttgaggtcaatggtagaaaaggaaactatcttcgtataaagactagacagaatgattctcagaaactcctttgtgatgtgtgtgttcaactcacagagtttaacctttcttttcatagagcagttagtaaacactttgtttataaagtctgcaagtggatattcagacccctttgaggccttcgttggaaacgggatttcttcatattatgctagacagaagaattcccagtaacttccttgtgttgtgtgtgttcaactcacagagttgaactttcatttacacagagcagatttgaaacactctttttgtggaatttgcaaatggagatttcaagcgctttgaggccaaaggcagaaaaggaattatcttcgtataaaaactagacagaatcattctcagaaactgctgcgtgatgtgtgcattcaactctcagagtttaacttttcttttcattcagcggtttggaaacactctgtttgtaaagtctgcacgtggatattttgaccacttagaggccttcgttggaaacgggttttttttcatgtaaggctagacagaagaattcccagtaacttcctcgtgttgtgtgcattcaactcacagagttgaacgttcccttagacagagcagatttgaaacactctatttgtgcaattggcaagtgtagatttcaagcgctttaaggtcaatggcagaaaagggaatatcttcgtttcaaaactagacagaatcattcccacaaactgcgttgtgatgtgttcgttcaactcacagagcttaacctttcttttcatagagcacttaggaaacactctgtttgtaaattctgtaagtggatattctgaaatcttgtggccttcgttggaaacgggatttcttcatattctgctagacagaagaattctcagtaacttcccttgtgttgtgtgtattcaactcacagagttgaatgatcctttacacagagcagacttgaaacattctttttgtggaatttgcaagtggagatttcagccgctttgaggtcaatggtagaaaagtaaatatcttcgtataaagactagacagaatgattctcagaaactcctttgtgatgtgtgcgttcaactcacagagtttaacctttctgttcatagagctgttaggaaacactctgttcgtaaagtctgcaagtggatattcagacctccttgaggccttcgttggaaacgggatttcttcatattctgctagacagaagaattctcagtaacttccttgtgttgtgtttattcaactcacagagttgaatgatcctctacacagagcagacttgaaacactctttttgtggaatttgcaagtggagatttcagccgctttgaagtcaatggtagaaaagtaaatatcttcgtataaagactagacagaatgattctcagaaactcctttgtgatgtgtgagttcaactcacagagtttatcctttcttttcatagagcagttaggaagcactctgtttgtaaagtctgcaagtggatattcagacctctttcaggccttcgttggaaacgggatttcttcatattctgctagacagaagaattctcagtaacttccttgtgttgtgtgtattcaactcacagagttgaacgatcctttacacagagcagacttgaaacactctttctgtggaatttgcaagtggagatttcagccgctttgaggtcaatagtagaaaaggaaatatgcttcgtagaaaaactagacagaatgattctcagaaactcctttgtgatgtgtgcgttcaactcacagagtttaacctttcttttcatagagcagttgggaaacactctgtttgtaaagtctgcaagtggatattcagacatccttgaggcattcgttggaaacgggatttcttcatattctgctagaaagaagaattctcagtaacttccttgtgttgtgtgtattcaactcacagagttgaacgatcctttacacagagcagacttgaaacattctttttgtggaatttgcaagtggagatttcagccgctttggggtcaatggtagaataggaaatatcttcctatagaaactagacagaatgattctgagaaactcctttgtgatgtgtgcgttcaactcacagagtttaacctttcttttcatagagcagttgggaaacactccgtttgtaaactctgcaagtggatattcagacctcctttaggccttcgttggaaacgggatttcttcatattatgctagacagaagaattctcagtaacttccttgtgttgtgtgtattcaactgacagagttgaactttcatttagagagagcagatttgaaacactgtttttctggaatttgcaagtggagatttcaagcgctttggggccaaaggcagaaaaggaaatatcttcgtataaaaactagacagaatcattctcagaatctgctgcgtgatgtgtgcgttcaactctcagagtttaacttttcttttcattcagcggtttggaaacactctgtttgtaaagtctgcacgtggatattttgaccacttagaggccttcgttggaaacgggattttttcatgtaaggctagacagaagaattcccagtaacttccttgtgttgtgtgcattcaactcacagagttgaacgttcccttagacagagcagatttgaaacactctatttctgcaatttgcaagtgtagtttccaagctctttaaggtcaacggcagaaaaggaaatatcttcgtttcaaaactagacagaatcattcccacaaactgcgttgtgatgtgttcgttcaactcacagagtttaacctttctgttcatagagcagttaggaaacactctgtttgtaaagtctgtaagtggatattctgacatcttgtggccttcgttggaaacgggatttcttcatattctgctagatagaacaattctcagtaacttccttgtgttgtgtgtattcaacacacagagttgaacgatcctttacacagagcagacttgaaacactctttttgtggaatttgcaagtggagatttcagccgctttgaggtcaatggtagaataggaaatatcttcctatagaaactagacagaatgattctcagaaactcctttgtgatgtgtgcgttcatctcacagagtttaacctttcttttcatagagcagttgggaaacactctgtttgtaaagtctgcaagtggatattcagacatccttgaggctttcgttggaaacgggatttcttcatattctgctagaaagaataattctcagtaacttccttgtgttgtgtgtattcaactcacagagttgaaggatcctttacagagagcaggcttgaaacactctttttgtcgaatttgcaagtggagatttcagccgctttgaggtcaatggtagaataggtaatatcttcttatagaaactagacagaatgattctcatgaactcctttgtgatgtgtgcgttcaactcacagagtttaacctttcttttcatagagcagttaggaaacactctgtttgtaaagtctgcaagtggatattcagacctccttgaggccttcgttggaaacgggattacttcatattctgctagacagaagaattctcagtaacttccttgtgttgtgtgcattcaactcacagagttgaatgatcctttacacagagcagattagaaacactctttttgaggaatttgcaagtggagatttcagccgctttgaggtcaatggtagaaaaggaaatatcttcgtataaaaactagacagaatgattctcataaactcctttgtgatgtgcgcattcaactcacagagtttcacctttcttttcatagagcagttaggatacactctgtttgtaaagtctgcaagtggatattcagacctccttgaggccttcgttggaaacgggaattcttcatattctgctagacagaagaattctcagtaacttccctgtgttgtgtgtattcaactgacagagtcgaactttcatttagagagagcagatttgtaacactgtttttgtggaatttgcaagtggagatttcaagcgctttggggccaaaggtagaaaaggaaatatcttcgtataaaaactagacagaatcattctcagaaactgctctgcgatgtgtgcgttcaactctcagagtttaacttttcttttcattcagcagtttggaaacactctgtttgtaaagtctgcacgtggataacttgaccacttagaggacttcgttggaaacgggtttttttcctgtaaggctagacagaagaattcccagtaacttccttgtgttgtgtgcattcaactcactgagatgaacgttcccttagacagagcagatttgaaacactctatttgtgcaatttgcaagtgtagatttcaagcgctttaaggtcaatggcagaaaaggaaatatctttgtttcaaaactagacagaatcattcccacaaactgcgttgtgatgtgttcgttcaactcacagagtttaacctttctgttcatagagcagttaggaaacactctgtttgtaaagtctgtaagtggatattctgacatcttgtggccttcgttggaaacgggatttcttcatattctgcgagacagaataattctcagtaacttccttgtgttgtgtgtattcaactcacagagttgaacgatcctttacacagagcagacttgaaacactctttttgtggaatttgcaagtggagatttcagccgctttgaggtcaatggtagaataggaaatatcttcctatggaaactagacagaatgattctcagaaactcctttgtgatgtgtgtgttcaactcacagagtttaacctttcttttcatagaacagttagtaaacactctggttttaaagtctgcaagtggatattcagacccctttgaggccttcgttggaaacaggatttcttcatattctgctagacagaataattctcagtaacttccttgtgttgtgtgtattcaactaacagagttgaactttcatttggagagagcagatttgaaacactgtttttgtggaatttgcaagtggagatttcaagcgctttggggccaaaggcagaaaaggaaatatcttcgtataaaaactagacagaatcattctcagaaaatgctctgtgatgtgtgcgttgaactctcagagtttaacttttgttttcattcagcagtttggaaatactctgtttgtaaagtctgcacgtggatattttgaccacttagaggccttatttggaaacgggtttttttcatgtaagggtagacagaagaattcccagtaactttccttgtgttgtgtacattcaactcacagagttgaacgttcccttagacagagcagatttgaaacactctttttgtgcaattggcaagtggtgatttcagccgctttgaggtcaatggtagaaaaggaaatatcttcctataaaaactagacagaatcattcccacaaactgcgttgtgatgtgttcgttcaactcacagagtttaacctttcttttcatagagcagttaggaaacagtctgtttgtaaattctgtaagtggatattctgacatcttgtggccttcgttggaaacgggatttcttcatattctgctagagagaatacttctcagtaacttccttgtgttgtgtgtattcaactcacagagttgaaggatcctttacagagagcaggcttgaaacactctttttgtcgaatttgcaagtggagatttcagccgctttgtggtcaatggtagaataggaaatatcttcttatagaaactagacagaatgattctcagaaacttctttgtgatgtgtgcgttcaactcacagagtttaacctttcttttcatagagcagttaggaaacactctgtttgtaaactctgcaagtggatattcagacctgtttgaggccttcgttggaaacggtatttcttcatactatgctagacagaagaattctcagtaacttccttgtgttgtgtgtattcaactcacagagttgaacgatcctttacacagagcagacttgtaacactctttttgtggaatttgcaagtggagatttcagccgctttgaagtcaaaggtagaaaaggaaatatcttcctataaaaactagatagaatgattctgagaaactcctttgtgatgtctgcgttcaactcacagagttcaacctttcttttcatagagcagttaggaaacactctgtttgtaaagtctgcaagtggatattcagacttctttgaggctttcgttggaaacgggatttcttcatattctgctagacagaagaattcccagtaacttccttgtgttgtgtgtgttcaactcacagagttgaactttcattcacacagagcagatttgaaacactctttttgtggaatttgcaagtggagatttcaagcgctttgaggccaaaggcaaaaaaggaaatatcttcgtataaaaactagacagaatcattctcagaaactgctctgcgatgtgtgcgttcaactctcagagtttaacttttcttttcattcagcagtttggaaacactctgtttgtaaagtctgcacgtggatattttgaccacttaggggccttcgttggaaacgggtttctttcctgtaaggctagacagaagaattcccagtaacttccttgtgttgtgtacattcaactcacagagttgaacgttcccttagacagagcagatttgaaacactctttttgtgcaattggcaagtggagatttcaagcgctttgaggtcaatggcagaaaacgaaatatcttcgtttcaaaactagacagaatcattcccacaatctgcgttgtgatgtgttcgttcaactcacagagtttaacctttcttttcatagagcagttaggaaacagtctgtttgtcaattctgtaagtggatattctgacatcttgtggccttcgttggaaacgggatttcttcatattctgctagacagaagaattctcagaaacttccttgtgttgtgtgttttcaactcacagatttgaacgatgctttacacagagtagacttgaaacactctttttgtggaatttgcaagtggagatttcagccgctttgaggtcaatggtagaaaaggaaatatcttcgtttaaaaactagacagaatgattctcagaaactcatttgtgatgtgtgcgttcaactcacagagtttaacctttcttttcatagagcagttaggaaacactctgtttgtaatgtctgcaagtggatattcagacctctttgaggccttcgttggaaacgggatttcttcatattacgctagacagaaaaattctcagtaacttccttgtattctgtgtattcaactctcagagttgaatgatcctttacacagagcagacttgaaacactctttttgtggaatttgcaagtggagatttcagccgctttgtggtcaatggtagaataggaaatatcttcctatagaaactagacagaatgattctcagaaactcctttgtgatgtgtgcgttcaactcacagagtttaacctttctgttcatagagcagttaggaaacattccgtttgtaaagtctgcaagtggatattcagacctctttgaggccttcgttggaaacgggatttcttcatattatgctagacagaagaattctcagcaacttccttgtgttgtgtgtattcaactcacagagttgaacgatcctttacacagagcagacttgaaacactctttttgtggaatttgcaagtggagatttcagccgctttcaggtcaatagtagaaaaggaaatatcttcgtagaaaaactagacagaatcattctcagaaactccttcgtgatgtgtgccgttcaactcacagagtttaacctttcttttcatagagcagttaggaaacactctgtttataaagtctgcaagtggatattcagacctctttgaggccttcgttggaaacaggatttcttcatatgatgctagacagaagaattctcagtgacttccttgtgttgtgtgtattcaactcacagagttgaacgatcctttacacagagcagacttgaaacactctttttgtggaatttgcaagtggagatttcagccgctatgtggtcaatggtagaataggaaatatcttcctatagaaactagacagaatgattctcagaaactcctttgtgatgtgtgccttcaactcacagagtttaacctttcttttcatagagcagttaggaaacactctgtaaagtctgcaagtggatattcagacctctttgaggccttcgttggaaacgggatttcttcatattctgctagacagaagaattctcagtaacttccttgtgttgtgtgtattcaactcacagagttgaacgatcctttacacagagcagacttgaaacactctttttgtggaaattgcaagtggagatttcagccgctttgaggtcaatggtagaaaaggaaatatcttcgtataaaaactggagagaatgattctcagaaactcctttgtgatgtgtgcgttcaactcacagagtttaacctttcttttcgtagagcagttaggaaacactctgtttgtaaagtctgcaagtggatattcagacctccttgaggccttcgttggaaacgggatttcttcatattctgctctacagaagaattctcagtaacttccttgtgttgtgtgtattcaactcacagagttgaacgatcctttacacagtgcagacttgaaacactctttttgtggaatttgcaagtggagatttcagccgctgtgagttcaatggtagaataggaaatatcttcctatagaaactagacagaatgattctcagaaactcctttgagatgtgtgtgttcaactcacagagtttaacctttcttttcatagagcagttaggaatcactctgtttgtaaagtctgcaagtggatattgagacctctttgaggccttcgttggaaacgggattttttcatataaggctagacagaataattctcagtaacttccttgtgttgtgtgtattcaactcacagagttgaacgatcctttacacagagcagacttgaaacactctttgtgtggaatttgcaagtggagatttcagccgctttgaggtcaatggtagaataggaaatatcttcctatagaaactagacagaatgattctcagaaactcctttgtgatgtgtgcgttcaactcacagagtttaactttccttttcatagagcagttaggaaacactctgtttgtaatgtctgcaagtggatattcagacccctttgaggccttcgttggaaacgggatttcttcatattatgctagacagaataattctcagtaacttccttgttttgtgtgtattcaactcacagagttgaacgatcctttacagagagcagacttgaaacactctttttgtggaatttgcaagtggagatttcaggcgctttgaggtcaatggtagaataggaaatatcttcctatagaaactagacagaatgattctgagaaactcctttgtgatgtgtgcgttcaactcacacagtttaacctttcttatcatagagcagttaggaaacactctgtttgtaaagtctgcaagtggatattcagacctccttgaggccttcgttggaaacgggatttcttcatattatgctagacataagaattctcagtaactgccttgtgttgtgtgtattcaactcacagagttgaacgatcctttacacagggcagacttgaaacactctttttgtggaacttgcaagtggagatttcagccgctttgaggtcaatggtagaataggaaatatcttcctatagaaactagacagaatgattctcagaaactcctttgtgatgtgtgcgttcaactcgcagagttcaacctttcttttcatagagcagttgggaaacactctgtttgtaaagtctgcaagtggatattcagacatccttgaggctttcgttggaaacgggttttcttcatattctgctagaaagaagaattctcagtaacttccttgtgttgtgtgtattcaactcacagagttcaacgatcctttacacagagcagacttgaaacactctttttggggaatttgcaagtggagatttcagccgctttgaggtcaatggttgaaaaggagatatcttcgtataaaaactagacagaatgattctcagaaactcctttgtgatgtgtgcgttcaactcacagagtataacctttcttttcttagagcagttaggaaacactctgtttgtaaagtctgcaagtggatattcagacctccttgaggccttcgttggaaacgggtttttttcatataaggctagacagaagaattctcagtaacttccttgtgttgtgtgtattcaactcacagagttgaacgatcctttacacagagcagacttgaaactctctttttgtggaatttgcaagtggagatttcagccgctttgagttcaatgttagaataggaaatatcttcctatagaaactagacagaatgattctcaaaaactcctttgtgatgtgtgcgttcaactcacagagttcaacctttcttttcctagagcagttgggaaacactctgtttgtaaagtctgcaagtggatattcagacttctttgaggccttcgttggaagcgggatttcttcatattctgctagacagaagaattctcagtaacttccttgtgttgtgtgtattcaactgacagagttgaactttcatttggagagagcagatttgaaacactgtttttgtggaatttgcaagtggagatttcaagcgctttggggccaaaggcagaaaaggatatatcttcgtagaaaaactagacagaatcattctcagaaactgctctgcaatgtgtgcgttcaactctcagagtttaactttgcttttcattcagcagtttggaaacactctgtttgtaaagtctgcacgtggatattttgaccacttagaggccttcgttggaaacgggtttctttcctgtaaggctagacagaagaattcccagtaacttccttgtgttgtgtgcattcaactcacagagttgaacgttgccttagacagagcagatttgaaacactctatttgtgcaatttgcaagtgtagatttcaagcgctttaaggtcaatggcagaaaaggaaatatcttcgtttcaaaactagacagaatgattctcagaaacttcattgtgatgtgtgcgttcaactcacagagttaaacctttcttttcatagagcagttgggaaacagtctgtttgtaaattctgtaagtggatattctgacatcttgtggccttcgttggaaacaggatttcttcatattctgctagacagaagaattctcagaaacttccttgtgttgtgtgtattcaactcacagagttgaacgatcgtttacacagagcagacttgagacactctttttgtggaatttgtaagtggagatttcagccgctttgaggtcattggtagaaaaggaaatatcttcatataaaaactagacagaatgattctcataaactcctttgtgatgtgtgcgttcaactcacagcagtttaacttttcttttcatagagcagttaggaaaaactctgtttgtaaagtctgcaagtggatattcagacctctttgaggccttcgttggaaacgggatttcttcatattatgctagacagaagaattctcagtaacttccttgtgttgtgtgtattcaactcacagagttgaacgatcctttacacagagcagacttgaaacactctttttgtggaatttgcaagtggagatttcagccgctttgagttcaattgtagaataggaaatatcttcctatagaaactagacagaatgattctcagaaactcctttgtgatgtgtgcgttcaactcacagagtttaacctttcttttcatagagcagttaggaaacactctgtttgtaaagtctgcaagtggatattcagtcttctttgaggctttcgttggaaacgggatttcttcatattctgctatacagaagaattctcagtaacttccttgtgttgtgtgcattcaactcagagagttgaacgatcttttacacagagcagattggacacactcttgttgtggaattgcaagtggagatttcagcccctttgaggtcaatggtagaaaaggaaatatctttgtataaaaacaagacagaatgattctcagaaactcctttgtgatgtgtgcgttcaagtcacagagtttaacctttcttttcatagagcagttaggaaacactctgtttctaaagtctgcaagtggatattcagacctctttgaggccttcgttggaaacgggatttcttcatattctgctagacagaagaattctcagtaacttccttgtgttgtgtgtattcaactcacagagttgaacgatcctttatacagagcagacttgtaacactctttttgtggaatttgcaagtggagatttcagccgctttgaagtcaaaggtagaaaaggaaatatcttcctataaaaactagacagaatgattctcagaaaatcttttgtgatgtgtgcgtttaactcacagagtttaacttttcttctcatagagcagttaggaaacactctgtttgtaaagtctgcaagtggatattcagacctctttgaggccttcgttggaaacgggatttcttcatattatgctagacagaagaattctcagtaacttccttgtgttgtgtgtattcaactgacagagttgaactttcatttagacagagcagatttgaaacactcttcttgtggaatttgcaaatggagatttcaagcgctttgaggccaaaagcagaaaaggaaatatcttcgtataaaaactagacagaatcattctcagaaactgctctgcgatgtgtgcgttcaactctcagagtttaacttttcttttcattcagcagtttggaaacactctgtttgtaaagtctgcacgtgtttattttgaccacttagaggccttcgttggaaacgggtttttttcctgtaaggctagacagaagaattcccagtaacttccttgtgttgtgtgcattcaactcacagaggtgaacgttcccttagacagagcagatttgaaacactctatttgtgcaatttgcaagtgtagatttcaagcgctttaaggtcaatggcagaaaaggaaatatcttcgtttcaaaactagacagaatcattcccacaaactgcgttgggatgtgctcgttcaactcacagagtttaaactttctgttcatagagcagttaggaaacactctgtttgtaaagtctgtaagtggatattctgacatcttgtggcctttgttggaaacgggatttcttcatattctgctagacagaagaattctcagtaacttccttgtgttgtgtgttttcaactcacagagttgcacgatcctttacacagagcagacttgaaacactccttttgtggaatttgcaagtggagatttcagccgctttgaggtcaatggtagaataggaaatatcttcctatagaaagtagacagaatgattctcagaaactcctttgtgatgtgtgcgttcaactcacagagtttaacttttcttttcatagagcagttaggaaacactctgtttgtaaagtctgcaagtggatattcagacctctttgaggccttcgttggaaacgggatttcttcatattatgctagaccgaagaattgccagtaacttccttgtgttgtgtgtgttcaactcacagagttgaactttcatttacacagagcagatttgaaacactctttttgtggaatttgcaaatggagatttcaagcactttgaggccaaaggcagaaaaggaaatgtcttcgtttcaaaactagacagaatcattcccagaaactgctctgcgatgtgtgcgttcaactctcagagtttaacttttcttttcattcagcagtttggaaacactctgtttgtaaagtctgcacgtggataatttgaccacttagaggccttcgttggaaacgggtttttttcatgtaaggctagacagaagaattctcagtaacttccttctgttgtgtgtattcaactcacagagttgaacgatcctttacacagagcagacttgtaacactctttttgtggaatttgcaagtggagatttcagccgctttgaagtcaaaggtagaaaaggaaatatcttcctataaaaactagacagaatgattctcagaaactcctttgtgatgtgtgctttcaactcacagagtttaacgtttcttttcatagagcagttaggaaacactctgtttgtaaagtctccaagtggatattcagacctctttgaggccttcgttggaaacgggtttttttcatataaggctagacagaagaattctcagtaacttccttgtgttgcgtgtattcaactgacagagttgaactctcatttagatagagcagattttaaacactgtttttgtggaatttgcaagtgtatatttcaaccgctttggggccaaatgcagaaaaggaaatatcttcgtataaaaactagacagaatgattctcagaaactcctttgtgatgtgtgcgttcaactcacagagtttatcctttcttttcatagagcagttaggaaacactctgtttgtaaagtctgcaagtggatattcagacatctttgaggctttcgttggaaacgggatttcttcatattctgctagacagaagaattctcagaaacttcgttgtgttgtgtgtggtcaactcacagagttcaacgatcctttacacagagtagacttgaaacactctttttgtggaattggcagggtggagatttcagccgctttgaggtcaattttagaaaaggaaatatcttcgtataaaaactagacagaatgattctcagaaactcctttttgctgtgtgcgttcagctcacagagtttaacctttcttttcatagagcagttaggaaacactctgtttgtaaagtctgcaagtggatattcagacctccttgaggccttcgttggaaacgggatttcttcatattctgctatagagaagaattcccagtaacttccttgtgttgtgtgtgttcaactcacagagttgaactttcatttacacagagcagatttgaaacactctttttgtggaatttgcaagtggagatttcaagcactttgaggccaaaggcagaaaaggaaatatcttcgtttcaaaactagacagaatcattctcagaaactgctctgcgatgtgtgctttcaactctcagagtttaacttttcttttcattcagcagtttgaaaacactctgtttgtaaagtctgcacgtggataacttgaccacttagaggccttcgttggaaacgggtttttttcatgtaaggctagacagaagaattcccagtaacttccttgtgttgtgtacattcaactcacagagttgaacgttcccttagacagagcagatttgaaacactctttttgtgcaattggcaagtggagatttcaagcgctttaaggtcaatggcagaaacggaaatatcttcgtttcaaaactagacagaatcattcccacaaactgcgttgtgatgtgttcgttcaactcacagagtttaacctttcttttcatagaacagttaggaaacagtctgtttgtaaattctgtaagtggatattctgacatcttgtggccttcgttggaaacgggatttcttcatattctgctagacagaagaattctcagtaacttccttgtgttgtgtgtattcaactcacagagttgaacgatcgtttacacagagcagacttgagacactctttttgtggaatttgtaagtggagatttcagccgctttgaggtcaacggtagaaaaggaaatatcttcatataaaaactagacagaatgattctcagaaacttctttgtgatgtgtgcgttcaactcacagagtttaacctttcttttcatagagcagttaggaaacactctgtttgtaaactctgcaagtggatattcagacctgtttgaggccttcgttggaaacgggatttcttcatattatgctagacagaagaattatcagaaacttccttgtgttgtgtgtattcaactcaaagagttgaacgatcctttacacagtgcagacttgaaacactctttttgtggaatttgcaagtggagatttcagccgctttgaggtcaatggtagaataggaaatatcttcctataggaactagacagaacgattctcagaaactcctttgtgatgtgtgcgttcaactcacagagtttaacctttcttttcatagagcagttaggaaacactctgtttgtaaagtctgcaagtggatattcagacctgtttgaggccttcgttggaaacgggatttcttcatattctgctagacagaagaattcccagtaacttccttgtgttgtgtgtgttcaactcacagagttgaactttcatttacaaagagcagatttgaaacactctttttgtggaatttgcaggtggagatttcaagcgctttgaggccaaaggcagaaaaggaaatatcttcgtataaaaactagacagaatcattctcagaaactgctctgcgatgtgtgcgttcaactctcagagtttaacttttcgtttcattcagcagtttggaaacactctgtttgtaaagtctgcacgtggatattttgaccacttagaggccttcgttggaaacgggtttttttcatgtaaggctagacagaagaattctcagtaacttccttgtgttgtgtgtattcaactcacagatttgaacgatcctttacacagagcagacttaaaacactctttttgtggaatttgcaagtggagatttcagccgctttgaggtcaatgttagaaaaggaaactatcttcgtataaaaactagacagaatgattctcataaactcctttgtgatgtgtgcgttcaactcacagagtttaacttttcttttcatagagcagttaggaaacactctgtttgtaaagtctgcaagtggatattcagacctgtttgaggccttcgttggaaacgggatttcttcatattctgctagacagaagatttcccagtaacttccttgtgttgtgtgtgttcaactcacagagttgaactttcatttacacagagcagatttgaatcactctttttgtggaatttgcaaatggagatttcaagcgctttgaggccaaaggcagaaaaggaaatatcttcgtataaaaactagacagaatcattctcagaaaccgctctgtgatgtgtgcgttcaactctcagagtttaacttttcttttcattcagcagtttggaaacactctgtttgtaaagtctgcacgtggatattttgaccacttagaagccttcgttggagacaggtttttttcatgtaaggctagacagaagaattctcagtaacttccttgtgttgtgtgtattaaactcacagagttgaacgatcctttacacagagcagacttgaaacactctttttgtggaatttgcaagtggagatttcagccgctttgaggtcaatggtagaataggaaatatcttcctatagaaaatagacacaatgattctcagaaactcctttgtgatgtgtgcgttcaactcacacagtttaacctttcttttcatagagcagttaggaaacactctgtttgtaaagtctgcaagtggatattcagacctccttgtggccttcgttggaaacgggatttcttcctattatgctagacagaagaattctcagtaacttccttgtgttgtgtgtattcaactcacagagttgaacgatcctttacacagagcagacttgaaacactctttttgtggaatttgcatgtggagatttcagccgctttgagttcaatggtagaataggaaatatcttcttatagaaactagacagaatgattctcagaaactgctttgtgatgtgtgtgttcaacacacaaggtttaacctttcttttcatagagcagttaggaaacactctgtttgtaaagtctgcaactggatattcagacatccttgaggctttcgttggaaacgggatttcttcatattctgctagaaagaagaattctcagtaacttccttgtgttgtgtgtattcaactcacagagttgaacgatcctttacacagagcagacttgaaacactctttttgtggatatttgcaagtggagatttcagccgctttgaggtcaatgttagaaaaggaaatatcttcgtataaaaactagacagaatgattctgagaaactcctttgtgatgtgtgcgttcaactcacagagtttaacctttcttttcatagagcagttaggaaacactctgtttgtaaagtctgcaagtggatattcagacctccttgaggccttcgttggaaactgcatttcttcatattctgctatacagaagaattctcagtaacttccttgtgttgtgtgtattcaactcacagatttgaacgatcctttacacagagcagacttgaaacactctttttgtggaatttgcaagtggagatttcagcctctttgtggtcaatggtagaataggaaatatattcctatagaaactagacagaatcattctcagaaactgctgcgtgatgtgtgcgttcaactctcagagtttaacttttcttttcattcagcggtttggaaacactctgtttgtaaagtctgcacgtggaacttttgaccacttagaggccttcgttggaaacgggtttttttcatgtaaggctagacagaagaattcccagtaacttccttgtgttgtgtgcattcaactcacagagttgaacgttcccttagacagagcagatttgaaacactctatttgtgcaatttgcaagtgtagttttcaagctcttttaggtcaacggcagaaaaggaaatatcttggtttcaaaactagacagaatcattcccacaaactgcgttgtgatgtgttcgttcaactcacagagtttaacctttctgttcatagagcagttaggaaacactctgtttgtaaagtctgtaagtggatattctgacatcttgtggccttcgttgggaacgggatttcttcatattctgctagacagaagaattctcagtaacttccttgtgttgtgtgtattcaactcacagagttgaacgatcctttacacagagcagacttgaaacattctttttgtggaatttgcaagtggagatttcagccgctttgaggtcaatggtggaataagaaatatcttcctatagaaactagacagaatgattctcagaaactcctttgtgatgtgtgcgttcaactcacagagtttaacctttgttttcatagagcagttaggaaacactctgtttgtaaagtctgcaggtggatattcagacatctttgaggctttcgttggaaacgggatttcttcatattctgctatacagaagaattcccagtaacttctttgtgttgtgtgtgttcaactcacagagatgaactctcatttacacagagcagatttgaaactctctttttgtggaatttgcaaatggagatttcaagcgctttgaggccaaaggcagaaaaggaaatatcttcgtataaaaactaggcagaatcattctcagaaactgctctgcgatgtgtgcgttcaactctcagagtttaacttttcttttcattcagcagtttggaaacactctgtttgtaaagtctgcacttggataatttgaccacttagaggcctttgttggaaacgggtttttttcatgtaaggctagacagaagaattctcagaaacttcgttgtgttgtgtgttttcaactcacagagttgaacgatcctttacacagcgtagacttgaaacactctttttgtggaatttgcaagtggagatttcatccgctttgaggtcaatggtagaaaaggaaatatcttcgtataaaaactagacagaatgattctcagaaactcctttgtgatgtgtgcgttgaactcacagagtttaacctttcttttcatagagcagttaggaaacactctgtttgtaaagtctgcaagtggatattcagacctctttgaggccttcgttggaaacggttttttttcatataaggctagacagaagaattctcagtaacttccttgtgttttgtgtattcaactgacagagttgaactttcatttagagagagcagatttgaaacactgtttttgtggaatttgcaattggagatttcaagcgctttggggccaaaggcagaaaaggaaatatcttcgtataaaaactagacagaatcattctcagaaactgctctgcgatgtgtgcgttcaactctcagagtttaacttttcttttcattcagcagtttggaaacactctgtaaagtctgcacgtggatattttgaccatttagaggctttcgttggaaacgggtttttttttgtaaggctagacagaagaattcccaggaacttccttgtgttgcgtacattcaactcacacatttgaacgttcccttagacagagtagatttgaaatactctttttctgcaattggcaagtggtgatttcagccgctttgaggtcaatggtagaaaaggaaatatcttcgtataaaaactagacagaatcattcccacaaactgcgttgtgatgtgttcgttcaactcacagagtttaacctttctgttcatagagcagttaggaaacactctgtttgtaaagtctgaaagtggatattctgacatcttgtggccttcgatggaaacgggatttcttcatattctgctagacagaagaattctcagaaacttccttgtgttgtgtgtattcaactcacagagatgaacgatcctttacacagagcagacttgaaacactctttttgtggaatttgcaagtggagatttcagccgctttgaggtccatggtagaaaaggaaatatcttcgtataaaaactagacagaatgattctcagaaactcctttgtgatgtgtgcgttcaactcacagagttcaacctttcttttcatagagcagttaggagacactctgtttgtaaagtctgcaagtggatattcagacctctttgaggccttcgttggaaacgggttttcttcatattctgctagagagaagaattcccagtaacttccttgtgttgtgtacattcaactcacagagttgaacgttcccttagacagagcagacttgtaacactctttttgtggaatttgcaagtggagatttcagcagctttgaagtcaaaggtagaaaaggaaatatcttcctataaaaacttgacagaatgattctcagaaactcctttgtgatgtgtgcgttcaactcacagagtttaacctttcttttcatagagcagttaggaaacactctatttgtaaattctgcaagtggatattcagacctccttaaggccttcgttggaaacgggatttcttcatattatgctagacagaagaattcccagtaacttccttgtgttgtgtgtgttcaactcacagagttgaactttcatttacacagagcagatttgaaacactctttttgtggaatttgaaatggagatttcaagcgctttgaggccaaaggcagaaaaggaaatatcttcgtataaaaacgagacagaatcattctcagaaactgctctgcgatgtgtgcgttcaactctcagagtttaacttttcttttcattcagaagtttggaaacactctgtttgtaaagtctgcacgtggataacttgaccacttagaggccttcgttggaaacgggtttttttcatgtaagtctagacagaagaattcccagtaacttccttgtgttgtgtacattcaactcacagagttgaacgttcccttagacaaagcagatttgaaacactctttttgtgcaattggcaaatggagatttcaagcgctttaaggtcaatggcagaaaaggaaatatcttcgtttcaaaactagacagaatcattcccacaaactgcgttgtgatgtgttcattcaactcacagagtttaacctttccgttcatagagcagttaggaaacacactgtttgtaaagtctgtaagtggatattctgacatcttgtggccttcgttggaaacgggatttcttcatattctgctagacagaagaattctgagaatcttccttgtgttgtgtgtattcaactcacagagttgaacgatcctttacacagagcagacttgaaacactctttttgtggaatttgcaagtggagatttcagccgctttgaggtccatggtagaaaaggaaatatcttcgtataaaaactagacagaatgattctcagaaaatcctttgtgatgtgtgcgttcaactcacagagtttaacttttctgttcatagagcagttaggaaacactctgtttgtaaagtctgcaagtggatattcagacctctttgaggccttcgttggaaacgttatttcttcatattatgctagacagaagaattctcagtaacttcccttgtgttgtgtgtattcaactcacagagttgaacggtcctttacacagagcagacttgaaacactctttttgttgaatttgcaagtggagatttcagccgctttgaggtcaatggtagaataggaaatatcttcctatagaaactagacagaatgattctcagaaactcctttgtgatgtgtgtgttcaactcacagagtttaacctttcttttcatagaacagttagggaacactctgtttgtaaagtctgcaagtggatattcagacctctttgaggccttcgttggaaacacgtttttttaatctaaggctagacagaagaattcccagtaacttccttgtgttgtgtgtgttcaactcacagagttgaactttcatttacacagagcagatttgaaacactctttttgtggaatttgcagatggagatttcaagcgctttgaggccaaaggcagaaaaggaaatatcttcgtataaaaactagacagaatcattctcagaaactgctctgtgatgtgtgcgttcaactctcagagtttaacttttcttttcattcagcagtttggaaacactctgtttgtaaagtctgcacgtggataatttgaccacttagaggccttcgttggaaacgggtttttttcatgtaaggctagacagaataattctcagtaacttccttttgttgtgggtattcaactcagagttgtacgatcctttacagagagcagacttgaaacactctttttgtggaatttgcaagtggagatttcagccgctttgaggtcaatggtagaataggaaatatcttcctatagaaactagacagaatgattctcagaaactcctttgtgatgtgtgcgttcaactcacagagtttaacctttcttttcgtagagcagttaggaaacactctgtttgtaaagtctgcaagtggatattcagacctccttgaggccttcgttggaaatgggatttcttcatattctgctagacagaagaattctcactaacttccttgtgttgtgtgtattcaactcacagagttgaacgatcctttacacagagcagacttgaaacactctttttgtggaatttgcaagtggagatttcagccgctttgaggtcaacggtagaaaaggaaatatctccgtataaagactagacagaatcattctcagaaactgctctgcgatgtgtgcgttcaactctcagagtttaacttttcttttcattcagcagtttggaaacactctgtttgtaaagtctgcacgtggatattttgaccatttagaggccttcgttggaaacgggtttttttcatgtaaggctagacagaagaattcccagtaacttccttgtgttgtgtacattcaactcacagagttgaacgttcccttagacagagcagatttgaaacactctttttgtgcaattggcaagtggtgatttcagccgctttgaggtcaatggtagaaaaggaaatatcttcctataaaaactagacagaatcattcccacaaactgcgttgtgatgtgttcgttcaactcacagagtttaacctttctgttcatagagcagttaggaaacactctgtttgtaaagtctgcaagtggatattcagacctccttgaggccttcgttggaaacgggatttcttcatattactgctagacagaataattctcagtaacttccttgtgttgtgtgtattcaactcacagagttgaaggatcctttacagagagcaggcttgaaacactctttttgtcgaatttgcaagtggagatttcagccgctttgtggtcaatggtagaaaagtaaatatcttcctataaagactagacagaatgattctcagaaactcctttgtgatgtgtgcgttcaactcacagagtttaacctttcttttcatagagcagttaggaaacactctgtttgtaaagtctgcaagtggatattcagacaactttgaggccttcgttggaaacgggatttcttcatgttctgctagacagaagaattcccagtaactttccttgtgttgtgtgtgttcaactcacagagttgaactctcatttacacagagcagatttgaaacactctttttgtggaatttgcaagtggagatttcaagcgctttgaggccaaaggcagaaaaggaaatatcttcgtataaaaactagacagaatcattctcagaaactgttgcgtgatgtgtgcgttcaactctcagagtttaacttttcttttcattcagcggtttggaaacactctgtttgtaaagtctgcacgtggatattttgaccacttagaggccttcgttggaaacgggttttttttcatgtaaggctagacagaagaattcccagtaacttccttgtgttgtgtgcattcaactcacagagttgaacgttcccttagacagaccagatttgaaacactctatttgtgcaatttgcaagtgtagatttcaagcgctttgaggtcaatggcagaaaaggaaatatcttcgtttcaaaactagacagacaatcattctcacaaactacgttgtgatgtgttcgttcaactcacagagtttaaactttctgttcatagagcagttaggaaacattctgtttgtaaagtctgtaagtggatattctgacatcttgtggccttcgttggaaacgggatttcttcatattctgctagacagaagaattctcagtaacttccttgtgttgtgtgtattcaactcacagagttgaacgatcctttacacagagcagacttgaaacactctttttgtggaatttgcaagtggagatttctgccgctttgaggtcaatggtagaataggaaatatcttcgtataaaaactagacagaatgattctcagaaactcctttgtgctgtgtgtgttcaactcacagagtttaacctttcttttcatagagcagttaggaaacactctgtttgtaaagtctgcaagtggatattcagacctctttgaggccttcgttggaaacgggtttttttcatataaggctagacagaagaattctcagtaacttccttgtgttgtgtgtattcaactgacagagttgaactttcctttagagagagcagatttgaaacactgtttttgtggaatttgcaagtggagatttcaagcgctttggggccaaaggcagaaaaggaaatatcttcgtataaaaactagacagaatcattctcagaaactgctctgcgatgtgtgcgttcaactctcagagtttaacttttcttttcattcagcagtttggaaacactctgtttgtaaagtctgcacgtggatatttgaccacttagaggccttcgttggaaacgggtttttttcctgtaaggctagacagaataaatcccagtaacttccttgtgttgtgtgcattcaactcacagagttgaacgttcccttagacagagcagatttgaaacattctatttgtgtaatttgcaagtgtagatttcaagcgctttaaggtcaatggcagaaaaggaaatatcttcgtttcaaaactagacagaatcattcccacaaactgcgttgtgatgtgttcgttcaactcacagagtttaacctttctgttcatagagcagttaggaaacactctgtttgtaaagtctgtaagtggatattctgacatcttgtggccttcgttttaaacgggatttcttcatattctgctagacagaagaattctcagtaacttctttgtgttgtgtgtattcaactcacagagttgaacgatcctttacacagagcagactggaaacactctttttgtggaatttgcaagtggagatttcagccgctttgaggtcaatgttagaataggaaatatcttcctatagaaactagagagaatgattctcataaactcctttgtgatgtgtgcgttcaactcacagagtttaacctttcttttcatagagcagttaggaaacactctgtttgtaaattctgcaagtggatattcagacctccttgaggccttcgttggaaacgggatttcttcatattctgctagacagaaaaattctcagtaacttccttgtgttgtgtgtattcaactcacagagttgaacgatcctttacacagagcagacttgaaacgctctttttgtggaatttgcaagtggagatttcagccgcgttgaggtcaatggtagaaaaggaaatatcttcgtataaaaactagacagaatgattctcaaaaactcctttgtgatgtgtgcgttcaactcacagagtttaacctttctgttcatagagcagttaggaaacactctgtttgtaaagtctgcaagtggatattcagacctccttgaggccttctttggaaacgggatttcttcatattctgatagacagaagaattctcagtaacttccttgtgttgtgtgtattcaactcaaagagttgaacgatcctttacacagagcagacttgaaacacactttttgtggaatttgcaagtggagatttcagccgctttgaggtcaaaggtagaaaaggaaactatgttcgtataaagagtagacagaatgattctgagaaactcctttgtgatgtggcgttcaactcacagagtttaacctttcttttcatagagcagttaggaaacactctgtttgtaacgtctgcaagtggatattcagacctccttgaggccttcgttggaaacgggttttcttcatattatgctagacagaagaattctcattaacttccttgtgttgtgtgtattcaactcacagagttgaacgatcctttacacagagcagacttgaaacactctttttgtggaatttgcaagtggagatttcagccgctttgagttcaatggtagaataagaaatatcttcctatagaaactatacagaatgattctcagaaactcctttgtgatgtgtgcattcaactcacagagtttaacctttcttttaatagagcagttaggaaacactctgtttgtaaagtctgcaagtggatattcagacctccttgaggccttcgttggaaacgggatttcttcatattatgctagacagaagaattctcagtaacttccttgtgttgtgtgtattcaactgacagagttgaactttcatgtagagagagcagatttgaaacactgtttttgtggaatttgcaagtggagatttcaagcgctttggggccaaacgcagaaaaggaaatatcttcgtataaaactagacagaatcattctcagaaactgctctgcgatgtgtgcgttcaactctcagagtttaacttttcttttcattcagcagtttggaaacactctgtttgtaaagtctgcacgtggatattttgaccacttagaggccttcgttggaaacgggtttttttcctgtaaggctagaaagaagaattcccagtaacttcccttgtgttgtgtacattcaactcacagagttgaacgttaccttagacagagcagatttgaaacactctttttgtgcaattggcaaatggagatttcaagcgctttaaggtcaatggcagaaaaggaaatatcgtcgtttcaaaactagacagaatcattcccacaaactgcgttgtgatgtgttcgttcaactcacagagtttaacctttcttttcatagagcagttaggaaacagtctgtttgtcaattctgtaagtggatattctgacatcttgtggccttcgttggaaacgggatttcttcatattctcctagacggaagaattctcagtaacttccttgtgttttgtgtattcaactcacagagttgaatgatcctttacgcagaacagacttgaaacactctttttgtggaatttgcaagtggagatttcagccgctttgaggtcaatggtagaaaaggaaatatattcgtataaaaactagacagaatgattctcagaaacttctttgtgatgtgtgcgctcaactcacagagtttaacctttcttttcatagagcagttagggaacactctgtttgtaaagtctgcaagtggatattcagacctctttgaagccttcgttggaaacgggatttcttcatattatgctagacagaagaattctcagtaacttccttgtgttgtgtgtattcaactcacagagttcaacgatccgttacacagagcagacttgaaacactctttttgtggaatttgcaagtggagatttctgccgctttgaggtcaatggtagacaaggaaatatcttcgtataaaaactagacagaatcattctcagaaactgctctgcgatgtgtgcgttcaactctcagagtttaacttttcttttcattcagcagtttggaaacactctgtttgtaaagtctgcacgtggatattttgaccacttagaggccttcgttggaaacgggtttttttcctgtaaggctagacggtagaattcccagtaactttccttgtgttgtgtacattcaactcacagagttgaacgtttccttagagagagcagatttgaaacactctttttgtgcaattggcaagtggtgatttcagccgctttgaggtcaatggtagaaaaggaaatatcttcgtataaaaactagacagaatcattcccacaaactgcgttgtgatgtgttcgttcaactcacagagtttaacctctccgttcatagagcagttaggaaacacactgtttgtaaagtctgtaagtggatattctgacatcttgtggccttcgttggaaacgggatttcttcatattctgctagacagaagaattctcagaatcttccttctgttgtgtgtattcaactcacagagttgaacgatcctttacacagagcagacttgaaacactctttttgtggaatttgcaagtggagatttcagccgctttgaggtccatggtagaaaaggaaatatcttcgtataaaaactagacagaatgattctcagaaaatcttttgtgatgtgtgcgttcaactcacagagtttaacttttcttctcgtagagcagttaggaaacactctgtttgtaaagtctgcaagtggatattcagacctctttgaggtcttcgttggaaacgggatttcttcatattatgctagacagaagaattctcagtaacttccttgtgttgtgtgtattcaactcacagagttgaacgaccctttacacagagcagacttgtaacactctttttgtggaatttgcaagtggagatttcagccgctttcaagtcaaaggtagaaaaggaaatatcttcctataaaaactagacagaacgattctcagaaactcctttgtgatgtgtgcgttcaactcacagagtttaacttttcttttcatagagccattaggaaacactctgtttgtaaagtctgcatgtggatattcagacctcctagaggccttcgttggaaacgggatttcttcatattctgctagacagaagaattcccagtaacttctttctgttgtgtgtgttcaactcacagagttgaactttgatttacacagagcagatttgaaacactctttttgtggaatttgcaagtggagatttcaagcgctttgaggccaaaggcagaaaaggaaatatcttcgtataaaaactagacagaatcattctcagaaactgctgcgtgatgtgtgcgttcaactctcagagtttaacttttcttttcattcagcggtttggaaacactctgtttctaaagtctgcacgtggatattttgaccacttagacgccttcgttggaaacgggtttttttcatgtaaggctagacagaagaattcccagtaacttccttgtgttgtgtacattcaactcacagagttgaacgttcccttagacagagcagatttgaaacactctttttgtgcaattggcaagtggtgatttcagccgctttgaggtcaatggtagaaaaggaaatatcttcgtataaaaactagacagaatcattcccacaaactgcgttgtgatgtgttcgttcaactcacagagtttaacctttcttttcatagaccagttaggaaacagtctgtttgtaaattctgtaagtggatattctgacatcttgtggccttcgttggaaacgggatttcttcatattctgctagacagaagaattctcagtaacttccttgtgttgtgtgtattcaactcacagagttgaacgatcctttacacagagcagacttgtaacactctttttgtggaatttgcaagtggggatttcagccgctttgaagtcaaaggtagaaaaggaaatatcttcctataaaaactagacagaatgattctcagaaactcctttgtgatgtgtgtgttcaactcacagagtttaaccttacttttcatagagcagttaggaaacactctgtttgtaaagtctgcaagtggatattcagacctctttgaggccttcgttggaaacgggtttttttcatataaggctagacagaagaattcccagtaacttccttgtgttgtgtgtgttcaactcacagagttgaactttcatttacacagagcagatttgaaacactctttttgtggaatttgcaagtggagatttcaagcgctttgaggccaaaggcagaaatggaaatatcttcgtttcaaaactagacagaatcattctcagaaactgctctgcgatgtgtgcattcaactctcagagtttaacttttcttttcattcagcagtttggaaacactctgtttgtaaagtctgcacgtggatattttgaccacttagaggccttctttggaaacgggtttttttcctgtaaggctagacagaagaattcccagtaacttccttgtgttgtgtgcattcaactaacagagttgaacgttcccttaaacagagcagatttgaaacactctatttgtgcaatttgcaagtgtagatttcaagcgctttaaggtcaacggcagaaaaggaaatatcttcgtttcaaaactagacagaatcattcccacaaactgcgttgtgatgtgttcgttcaactcacagagtttaaccattcttttcatagagcagttaggaaacagtctgtttgaaaattctgtaagtggatattctgacatcttgtggccttcgttggaaacgggatttcttcatattctgctagacagaagaattctcagtaacttccttgtgttgtgtgtattcaactcacagagttgaacgatcctttacacagagcagacttgaaacactctttttgtggaatttgcaagtggagatttcagccgctttgaggtcaatggtagaaaaggaaatatctttgtataaagactagacagaatgattctcagaaactcctttgtgatgtgtgcgttcaactcacagagttcaacttttcttttcatagagcagttaggaaacactctgtttgtaaagtctgcaagtggatattcagacctctttgaggccttcgttggaaacgggattttttcatattctgctagacagaagaattcccagtaacttccttgagttgtgtgtgttcaaatcacagagttgaactttcatttacacagagcagatttgaaacactctttttgtggaatttgcaagtggagatttcaagcgctttgaggccaaaggcagaaaaggaaatatctccgtttcaaaactagacagaatcattctcagaaaatgctctgtgaagtgtgcgttcaactctcagagtttaacttttcttttcattcagcagtttggaaacactctgtttgtaaagtctgcacgtggatattttgaccacttagaggccttcgttggaaacgggtttttttcatgtaagggtagacagaagaattcccagtaacttccttgtgttgtgtacattcaactcacagagttgaacgttcccttagacagagcagatttgaaacactctttttgtgcaattggcaagtggtgatttcagcctctttgaggtcaatggtagaaaaggaaatatcttcgtataaaaactagacagaatcattcccacaaactgcgatgtgatgtgttcgttcaactcacagagtttaacctttctgttcatagagcagttaggaaacactctgtttggaaagtctgtaagtggatattctgacatcttgtggccttcgttggaaacgggatttcttcatattctgctagacagaagaattctcagtaacttcccttgtgttgtgtgtattcaactcacagagttgaacgatcctttacacagagcagacttgaaacactctttttgtggaatttgcaagtggagatttcagccgcgttgaggtcaatggtagaaaaggaaatatcttcgtataaaaactagacagaatgattctcagaaactcctttgttatgtgtgcgttcaactcacagagtttaacttttcttttcatagagcagttaggaaacactctgtttgtaaagtctgcaagtggatattcagacctctttgacgccttcgttggaaacgggatttcttcatattctgctagacagaagaattctcagtaacttccttgtgttgtgtgtattcaactcacagagttgaacgatcctttacagagagcagacttgaaacactctttttgtggaatttgcaagtggagatttcagccgctttgaggtcaatggtagaaaaggaaatatcttcctctaaagactagacagaatcattctcagaaactgctctgcgatgtgtgcgttcaactctcagagtttaacttatcttttcattcagtagtttggaaacactctgtttgtaaagtctgcacgtggataatttgaccacttagaggtcttcgttggaaacgggtttttttcatgtaaggctagacagaagaattcccagtaacttccttgtgttgtgtacattcaactcacagagttgaacgttcccttagaaagagcagatttgaaacactctttttgtgcaattggcaagtggagatttcaagcaatttaaggtcaatggcagaaaaggaaatatcttcgtttcaaaactagacagaatgattctcagaaactcctttgtgatgtgtgcgttcaactcacagagtttaacttttcttttcatagagccgttaggaaacactctgtttgtaaagtctgcaagtggatattcagacctctttgaggccttcgttggaaacgggatttcttcatattctgctagacagaagaattctcagtaacttccttgtgttgtgtgtattcaactcagagacttgaatgatcctttacacagaacagtcttgaaacactctttttgtggaatttgcaagtggagatttcagccgctttgaggtcaatggtagaataggaaatatcttcctatagaaactagacagaacgattctcagaaactcctttgtgatgtgtgcgttcaactcacagagtttaacctttcttttcatacagcagttaggaaacactctgtttgtaaagtctgcaagtggatattcagacctctttgagaccttcgttggaaacgggatttcttcatattctgctagacagaagaattctcagtaacttccttgtgttgtgtgtattcaactcacagagttgaatgatcctttacagagagcagacttgaaacactctttttgtggaatttgcaagtggagatttcagccgctttgaggtcaatggtagaataggaaatatcttcgaagaaaaactatacagaatgattctcagaaactgctttttgatgtgtgcgttcaactcacagcgtttaacctttcttttcatagagcagttaggaaacactctgtttgtaaagtctgcaagtggatattcagacctctttgaggccttcgttggaaacgggatttcttcatattctgctagacagaggaattctcagtaacttccttgtgttgtgtgtattcaactgacagagttgaactttcatttagagagagcagatttgaaacactgtttttgtggaatttgcaagtggagatttcaagcgctttggggccaaaggcagaaaaggaaataccttcgtataaaaactagacagaatcattctcagaaactgctgcgtgatgtttgcgttcaactctcagagtttaacttttcttttcattcagcggtttggaaacactctgtttgtaaagtctgcacgtggaaattgtgaccacttagaggccttcgttggaaacgggtttttttcatgtaaggctagacagaagaattcccagtaacttccttgtgttgtgtgcattcaactcacagagttgaacgttcccttagacagagcagatttgaaacactctatttgtgcaatttgcaagtgtagttttcaagctctttaaggtcaacggcagaaaaggaaatatcttggtttcaaaactagacagaatcattcccagaaactgcgttgtgatgtgttcgttcaactcacagagtttaacctttctgttcatagagcagttaggaaacactctgtttgtaaagtctgtaagtggatattcagacatcttgtggccttcgttggaaacgggatttcttcatattctgctagacagaagaattctcagtaacttccttgtgttgtgtgtattcaactcacagagttgaacgatcctttacacagagcagacttgaaacactctttttgtggagtttgcaagtggagatttcagccgctttgaggtcaatggtagaaaaggaaatatcttcgtataaagactagacagaacgattctcagaaactcctttgtgatgtgtgcgttcaactcacagagtttaacctttcttttcatagagcagttaggaaacactctgtttgtaaagtctgcaagtggatattcagacctctttgaggccttcgttggaaacgggatttcttcatattctgctagaaagaagaattctcagtaacttccttgtgtggcgtgtattcaactgacagagttgaactttcatttagagagagcagatttgaaacactgtttttgaggaatttgcaagtggagatttcaagcgctttggggccaaaggcagaaaaggaaatatcttcgtataaaaactagacagaatcattctcagaaactgctctgcgatgtgtgcgttcaactctcagagtttaaatttccttttcattcagcagtttggaaacactctgtttgtaaagtctgcacgtggataacttgaccacttagaggccttcgttggaaacgggtttttttcatgtaaggctagacagaagaattcccagtaacttccttgtgttgtgtgcattcaacacacagagttgaacgttcccttagacagagcagatttgaaacactctatttgtgcaatttgcaagtgtagatttcaagcgctttatggtcaacagcagaaaaggaaatatcttcgtttcaaaactagacagaatcattctcagaaactgctgcgtgatgtgtgcgttcaactctcagagtttaacttttcttttcattcagctgtttggaaacactctgtttgtaaagtctgcaagtggatattcagacctcttgaggccttcgttggaaacgggatttcttcatattatgctagacagaataattctcagtaacttccttttgttctgtgtattcaactcacagagttgaacgatcctttacagagagcagacttgaaacactctttttgtggaatttgcaagtggagatttcagccgctttgaggtcaatggtagaaaaggaaatatcttcgtataaagactagacagaatcattctcagaaactgctctgcgatgtgtgcgttcaactctcagagtttaacttttcttttcattcagctgtttggaaacactctgtttgtaaagtctgcacgtggatattttgaccacttagaggccttcgttggaaacgggtttttttcctgtaaggctagacagaagaattctcagtaacttccttgtgttgtgtgtattcaactcacagagttgaatgatcctttacacagagcagacttgaaacactctttttgtggaatttgcaagtggagatttcatccgctttgaggtcaatggtagaaaaggagactatcttcatataaagactagacagactgattcccagaaactcctttgtgatgtgtgcgttcaactcacagagtttaacctttcttttcatagagcagttaggaaacactctgtttgtaaagtctgcaagtggatattcagacctctttgaggccttcgttggaaacgggtttttttcatataaggctagacagaagaattctcagtaacttccttgtgttgtgtgtattcaactgacagagttgaactttcatttagggagagcagatttgaaacactgtttttgtggaatttgcaagtggagatttcaagcgctttggggccaaaggcagaaaaggaaatatcttcgtataaaaactagacagaatcattctcagaaactcctgcgtgatgtgtgcgtccaactctcagagtttaacttttcttttcattcagcggtttggaaacactctgtttgtaatgtctgcacgtggttattttgaccacttagaggccttcgttggaaacgggtttttttcatgtaaggctagacagaagaattcacagtaacttccttgtgttgtgtgcattcaactcacagagttgaacgttcccttagacagagcagatttgaaacactctatttgtggaatttgcaagtgtagatttcaagcgctttaaggtcaatggcagaaaaggaaatatcttcgtttcaaaactagacagaatccttcccacaaactgcgttgtgatgtgttcgtccaactcacagagtttaacttttcttttcatagagcagttaggaaacagtctgtttgtaaagtctgtaagtggatattctgacctcttgtggccttcgttggaaacgggatttcttcatattctgctagacagaagaattctcagaatcttccttgtgttgtgtgtattcaactcacagagttgaacgatcctttacacagagcggacttgaaacactctttttgtggaatttgcaagtggagatttcagccgctttgaggtccatggtagaaaaggaaatatcttcgtataaaaactagacagaatgattctcagaaactcctttgtgatgtgtgcgttcaactcacagagtttaacctttcttttcatagagcagttaggaaacactctgtttgtaaagtctgcaagtggatattcagacctccctgaggccttctttggaaacgggatttgtccatattatgctagacagaagaattctcagtaacttccttgtgttgtgtgtattcaactgacagagttgaactttcatttagagagagcagatttgaaactctgtttttgtggaatttgcaagtggagatttcaagcgctttggggccaaaggcagaaaaggaaatatcttcgtataaaaactagacagaatcattctcagaaactgctgcgtgatgtgtgcgttcaactctcagagtttaacttttcttttcattcagcggtttggaaacactctgtttgtaaagtctgcacgtggaaaatttgaccacttagaggccttcgttggaaacgggtttttttcatgtaaggctagacagaagaattcccagtaacttccttgggttgtgtgcattcaactcacagagttgaacgttcccttagacagagcagatttgaaacactctatttgtgcaatttgcaagtgtagatttcaagcgctttaaggtcaacggcagaaaaagaaatatcttcttttcaaaactagacagaatcattcccacaaactgcgctgtgatgtgttcgttcaactcacagagtttaacctttctgttcatagagcagttaggaaacactctgtttgtaaagtctgcaagtggatattcagacctccttgaggccttcgttggaaacgggatttcttcatattctgctagacagaagaattctcagtaacttccttgtgttgtgtgtattcaactcacagagttgaacgatcctttacacagagcagacttgaaacactctttttgtggaatttgcaagtggagatatcagccgctttgaggtcaatggtagaataggaaatatcttcatataaaaactagacagaatgattctcagaaactcctttgtgatgtgtgcgttcaactcacagagtttaacctttcttttcatagagcagttaggaaacactctgtttgtaaagtctgcaagtggatattcagacatccttgaggctttcgttggaaacgggatttctttatattctgctagaaagaataattctcagtaacttccttgtgttgtgtgtattcaactcacagatttgaacgatccattacagagagcagacttgaaacactctttttgtggaatttgcaagtggagatttcagccgctttgaggtcaatggtagaataggaaatatcttcctatagaaactagacagaatgattctaagaaactcctttgtgatgtgtgcgttcaactcacagagtttaacctttcttttcatagagcagttaggaaacactctgattgtaaagtctgcaagtggatattcagacctccttgaggccttcgttggaaacgggatttcttcatattatgctagacagaagaattctcagtaacttccttgtgttgtgtgtatgcatctcactgagttgaacgatcctttgcacagagcagacttgaaacactctttttgtggaatttgcaagtggagatttcagccgctttgaggtcaatggtagaaaaggaaatatcttcgtataaaaactagacagaatgattctcagaaacttctttgtgatgtgtgcgttcaactcacagagtttaacctttcttttcatagagcagttaggaaacactctgtttgtaaactctgcaagtggatatatagacctctttgaggccttcgttggaaacgggatttcttcatagtatgctagacagaagaattctcagtaacttccttgtgttgtgtgtattcaactgacagagttgaactttcatttagagagagcagatttgaaacactgtttttgtggaatttacaagtggagatttcaagcgctttggggccaaaggcagaaaaggaaatatcttcgtataaaaactagacagaatcattctcagaaactgctgcgtgatgtgtgcgttcaactctcagagtttaacctttcttttcattcagcggtttggaaacactctgtttgtaaagtctgcacgtggatattttgaccacttagaggccttcgttggaaacgggtttttttcatgtaaggatagacagaagaaattcccagtaacttccttgtgttgtgtgcattcaactcacagagttgaacgttcccttagacagagcagatttgaaacactctatttgtgcaatttacaagtgtagatttcaagcgctttaaggtcaacggcagaaaaggaaatatcttcgtttcaaacctagacagaatcattcccacaaactgcgttgtgatgtgttcgttcaactcacagagtttaacctttctgttcatagagcagtaaggaaacactctgtttctaaagtctgtaagtggatattctgacatcttgcggccttcgttggaaacgggatttcttcatattctgctagacagaagaattctcagtaacttccttgtgttgtgtgtattcaactcacagagttgaacgatcctttacacagagcagacttgaaacactctttttgtggaatttgcaagtggagatttcagccgctttgaggtcaatggtagaaaaggaaatatcttcgaataaagactagacagaatgattctcagaaaatcttttgtgatgtgtgcgttcaactcacagagtttaacttttcttctcatagagcagttaggaaacactctgtttgtaaagtctgcaagtggatattcagacctcttagaggtcttcgttggaaacgggatttcttcatattatgctagacagaagaattctcagtaacttccttgtgttgtgtgtattcaactgacagagttgaactttcatttagagagagcagatttgaaacactgtttttgtggaatttgcaagtggagatttcaagcgctttggggccaagggcagaaaaggaaatatcttcgtataaaaactggacagaatcattctcagaaactgctgcgtgatgtgtgcgttcaactctcagagtttaacttttcttttcattcagcggtttggaaacactctgtttgtaaagtctgcacgtggatattttgaccacttagaggccttcgttggaaacgggttttttttcatgtaaggctatacagaagaattcccagtaacttccttgtgttgtgtgcattcaactcacagagttgaacgttcccttagacagagcagatgtgaaacactctatttgtgcaatttgcaagtgtagatttcaagcgctttaaggtcaatggcagaaaaggaaatatcttcgtttcaaaactagacagagatcattcccacaaactgcgttgtgatgtgttcgttcatctcacagagtttaacctttcttttcatagagcagttaggaaacactatgtttgtaaattctgtaagtggatattctgacatcttgtggccttcgttggaaacgggatttcttcatattctgctagacagataattctcagtaacttccttgtgttctgtgtattcaactcacagagttgaacgatcctttacagagagcagactttaaacactctttttgtggaatttgcaagtggagatttcagccgctttgaggtcaatggtagaaaaggaaatatcttcgtacaaagactagacagaatgattctcagaaactcctttgtgatgtgtgcgttaaactcacagagttttacctttctgttcatagagcagttaggaaacactctgtttgtaaagtctgcaagtggatattcagacctccttgaggccttcgttggaaacgggatttcttcatattctgctagacagaagaattctcaataacttccttgttttgtgtgtattcaactcacagagttgaacgatcctttacacagagcagacttgtaacactctttttgtggaatttgcaagtggagatttcagccgctttgaagtcaaaggtagaaaaggaaatatcttcctataaaaactagacagaatgattctcagaaactcctttgtgctgtgtgcgttcaactcacagagtttaacctttcttttcatagagcaattaggaaactctctgtttgtaaagtctgcaagtggatattcagacatctttgaggctttcgttggaaacgggatttcttcatattctgctagacagaagaattctcagaaatttccttttgttgtgtgttttcaactcacagagttgaacgaacctttacacagagtagacttgaaacactctttttgtggaattggcaagtggagatttcagccgctttgaggtcaatggtagaaaaggaaatatcttcgtataaaaactagacagaatgattctcagaaacttctttgtgatgtgtgcgttcaactcacagagtttaacctttcttttcatagagcagttagggaacactctgtttgtaaactctgcaagtggatattcagacctctttgaggccttcgttggaaacgggatttcttcatactatgctagacagaagaattctcagtaacttccttgtgttgtgtgtattcaactcatagagttgaacgatcctttacacagagcagacttgtaacactctttttgtggaatttgcaagtggagatttcagccgctttgacgtcaaaggtagaaaaggaaatatcttcctataaaaactagacagaatgattctcataaactcctttgtgatgtgtgcgttcaacgcacagagtttaacctttcttttcatagagcagttaggaaacactgtgtttgtaaagtctgcatgtggatattcagacctccttgaggccttcgttggaaacgggaattcctcatattctgctagacagaagaattcccagtaacttccttgtgttgtgtgtgttcgactcacagagttgaactttcatttacacagagcagatttgaaacactctttttgtggaatttgcaaatggagatttcaagcgctttgaggccaaaggcagaaaaggaaatatctttgtataaaaactagacagaatcattctcagaaactgctctgcgatgtgtgcgttcaactctcagagtttaacttttcttttcattcagcagtttggaaacactctgtttgtaaagtctgcacgtggataacttgaccacttagaggccgtcgttggaaacgggttttgttcatgtaaggctagacagaagaattcccagtaacttccttgtgttgtgtacattcaactcacagagttgaacgttcccttagacagagcagatttgaaacactctttttgtggaattggcaagtggtgatttcagccgctttgaggtcaatggtagaaaaggaaatatcttcgtataaaaactagacagaatcattcccacaaactgcgttgtgatgtgttcgttcaactcacagagtttaacctttcttttcatagaccagttaggaaacagtctgtttgtcaattctgtaagtggatattctgacatcttgtggccttcgttggaaacgggatttcttcatattctgctagaaagaagaattctcagaatcttccttgtgttgtgtgtattcaactcaaagagttgaacgatcctttacacagagcaggcttgaaacactctttttgtggaatttgcaagtggagatttcagccgctttgaagtcaatggtagaaaaggaaatatcttcgtataaaaactagacagaatgattctcagaaacttctttgtgatgtgtgcgttcaactcacagagtttaacctttcttttcatagagcagttaggaaacactctgtttgtaaactctgcaagtggatattcagacctctttgaggccttcgttgtaaaagggatttcttcatactatgctagacagaagaattctcagtaacttccttgtgttgtgtgtattcaactcacagagttgaacgattctttacacagagcagacttgtaacactctttttgtggaatttgcaagtggagatttcagcctctttgaagtcaaaggtagaaaaggaaatatcttcctataaaaactagacagaatgattctcagaaactcctttgtgatgtgtgcgtgcaactcacagagtttaacttttcttttcatagagcagttaggaaacactctgtttgtaaagtctggaagtggatattcagacctccttgaggccttcgttggaaacgggatttcttcatattctgctagacagaagaattcccagtaacttccttgtgttgtgtgtgttcgactcacagagttgaactttcatttacacagagcagatttgaaacactctttttgtggaatttgcaaatggagatttcaagcgctttgaggccaaaggcagaaaaggaaatatcttcgtataaaaactagacagaatgattctcagaaactcctttgtgatgtgtgtgttcaactcacagagattaacctttcttttcatagagcagttaggaaacactctgtttgtaaagtctgcaagtggatattcagacctctttgaggccttcgttggaaacgggatttctccatactatgctagacagaagaattctcagtcacttccttgtgttgtgtgtattcaactcacagagttgaacgatcctttacacagagcagacttgaaacactctttttgtggaatttgcaagtggagatttcagcagctttgaggtcaatagtagaaaaggaaatatcttcgtagaaaaactagacagaatgattctcagaaactcctttgtgatgtgtgcgttcaagtcacagagtttaacctttcttttcatagagcagttaggaaacactctgtttgtaaagtctgcaagtggatattcagacctctttgaggccttcgttggaaacgggatttcttcatattctgttagacagaagaattctcagtaacttcccttgtgttgtgtgtattcaactgacagagttgaactttcatttagagagagcagatttgaaacactgtttttgtggaatttgcaagtggagatttcaagcgctttgtggccaaaggcagaaaacgaaatatcttcgtataaaaactagacagaatcattctcagaaactgctctgcgatgtgtgcgttcaactctcagagtttaactttgcttttcattcagcagtttggaaacactctgtttgtaaagtctgcacgtggataatttgaccacttagaggccttcgttggaaacgggtttttttcctgtaaggctagacagaagaattctcagtaacttccttgtgttgtgtgtattcaactcacagagttgaacgatcctttacagagagcagactttaaacactctttttgtggaatttgcaagtggagatttcagccgctttgaggtcaatggaagaaaaggaaatatcttcgtataaagactagacagaatgattctcagaaactcctttgtgatgtgtgcgttcaactcacagagtttaacctttcttttcatagagcagttaggaaacactctgtttgtaaagtctgcaagtggatattcagacctctttgaggccttcgttggaaacgggttttttccatataaggctagtcagaagaattctcagtaacttccttgtgttgtgtgtgttcaactcacagagttgaaatttcatttacacagagcagatttgaaacactctttttgtggaaattgcaaatggagatttcaagcgctttgaggccaaaggcagaaaaagaaatatcttcgtataaaaactggacagaatcattctcagaaactgctctgcgatgtgtgcgttcaactctcagagtttaactttgcttttcattcagcagtttggaaacactctgtttgtaaagtctgcacgtggataatttgaacacttagaggccttcgttggaaacgggtttttttcatgtaaggctagacagaagaattcccagtaacttccttgtgttgtgtacattcaactcacagagttgaacgttcccttagacagagcagatttgaaacactctttttgtgcaattggcaagtggtgatttcagccgctttgaggtcaatggtagaaaaggaaatatcttcgtataaaaactagacagaatgattctcagaaactcctttaggatgtgtgcgttcaactcacagggtttaacctttcttttcatagagtagttaggaaacactctgtttgtaaactctgcaagtggatattcaaacctctttgaggccttcgttgcaaacgggatttcttcatattattgctgacagaagaattctcagaaacttcccttgtgttttgtgtattcaactcacagagttgaacgatcctttaaacagagcagacttgaaacactctttttgtggaatttgcaagtggagatttcagccgctttgaggtcaatggtagaaaaggaaatatcttcgtataaaaactagacagaatgattctgagaaactcctttgtgatgtgtgcgttcaactcacagagtttaacctttcttttcatagagcagttaggaaacactctgtttgtaaagtctgcaagtggatattcagacctctttgaggccttcgttggaaacgggattttttcatataaggctagacagaagaattctcagtaacttccttgtgttgtgtgtattcaactcacagagttgaacgatcctttacacagagcagacttgaaacagtctttttgtggaatttgcaagtggagatttcagccgctttgaggtcaatggtagaataggaaatatcttcctatagaaactagacagaatgattctcagaaactcctttgtgatgtgtgcgttcaactcacagagtttaacctttcttttcatagagcagttaggaaacactctgtttgtaaagtctgcaagtggatattcagacatccttgaggctttcgttggaaacgggatttcttcatattctgctagacagaagaattcccagtaacttccttgtgttgtgtgtgttcaattcacagagttgaactttcatgtacacagagcagatttgaaacactctttttgtggaatttgcaaatggagatttcaagcgctttgaggccaaaggcagaaaaggaaatatcttcgtataaaaactagacagaatcattctcagaaactgctctgcgatgtgtgcgttcaactctcagagtttaacttttcttttcattcagcagtttggaaacactctgtttgtaaagtctgcacgtggatattttgaccacttagaggccttcgttggaaacggttttctttcctgtaaggctagacagaagaattcccagtaacttccttgtgttgtgtgcattcaactcacagagttgaacgttcccttagactgagcagatttgaaacactctatttgtgcaatttgcaagtgtagatttcaagcgctttaaggtcaatggcagaaaaggaaatatcttcgtttcaaaactagacagaatcattcccacaaactgcgttgtgatgtgttcgttcaactcacagagtttaacctttctgttcatagagcagttaggaaacactctgtttgtaaagtctgcaagtggattttgagacctccttgaggccttcgttggaaacgggatttcttcatattctgctagacagaagaattctcagtaacttccttgtgttgtgtgtattcaactcacagagttgaacgatcctttacacagagcagacttgtaacactctttttctggaatttccaagtggagatttcagccgctttgaagtcaaaggtagaaaaggaaatatcttcctataaaaactagacagaatgattatcataaaatcctttgtgatgtgtgcgttcaactcacagagtttaacttttcttttcatagagcagttaggaaacactctgtttgtaaagtctgcaagtggatattcagacccctttgaggccttcgttggaaacgggatttcttcatattatgctagacagaagaattcccagtaacttccttgtgttgtgtgtgttcaactcacagagttgaactttcatttacacagagcagatttgaaacactctttttgtggaatttgcaagtggagatttcaagcgctttgaggccaaaggcagaaaaggaaatatcttcggtataaaaactagacagaatgattctcagaaactcctttgtgatgtgtgcgttcaactcacagagtttaacctttcttttcatagagcagttaggaaacactctgtttgtaaagtctgcaagtggatattcagacctctttgaggccttcgttggaaacgggatttcttcataatatgctagacagaagaattctcagtaacttccttgtgttgtgtgtattcaactcacagagttgaacgaacctttacacagagcagacttgaaacactctttttgtggaatttgcaagtgtagatttcatccgctttgaggtcaatggtagaaaaggaaatatcttcgtataaaaactagacagaatgattctcataaactcctttgtgatgtgtgcgttcaactcacagagtttaacttttcttttcatagagcagttaggaaacactctgtttgtaaagtctgcaagtggatattcagacctccttgactccttcgttggaaacgggatttcttcatattctgctagacagaaggattcccagtaacttccttgtgttgtgtgtgttcaactcacagagttgaactttcatttacaaagagcagatttgaaacactctttttgtggaatttgcaattggagatttcaagcgctttgaggccaaaggcagaaaaggaaatatcttcgtataaaaactagacaaaatgattctcagaatcttctttgtgatgtgtgtgttcaactcacagagtttaacctttcttttcatagagcagttaggaaacactctgtttgtaaactctgcaagtggatattcagacctcattgaggctttcgttggaaacgggatttcttcatactctgctagacagaagaattctcagtaacttccttgtgttgtgtgtattcaactcacagagttgaacgaccctttacacagagcggacttgaaacactctttttgtggaatttgcaagtggagatttcagccgcgttgaggtcaatggtagaaaaggaaatatcttcgtatagaaacttgacagaatgattctcagaaactcctttgtgatgtgtgcgttcaactcacagagttcaacctttcttttaatagagcagttgggaaacactctgtttctaaagtctgcaagtggatattcagacttctttgaggccttcgttggaaacgggatttcttcatattctgctagacagaagaattctcagtaacttccttgtgttgtgtgtattcaactgacagagttgaactttcatttagagagggcagatttgtaacactgtttttgtggaatttgcaagtggagatttcaagcgctttgcggccaaaggcagaaaaggaaatatcttcgtataaaaactagacagaatcattctcagaaactgctgcgtgacgcgtgcgttcaactctcaaagtttaacttttcttttcattcagcggtttggaaacactctgtttgtaaagtctgcacgtggatattttgaccacttagaggccttcgttggaaacgggtttttttcatgtaaggctagacagaagaattcccagtaacttccttgtgttgtgtacattcaactcacagagttgaacgttcccttagaaagagcagatttgaaacactctttttgtgcaattggcaagtggtgatttcagccgctttgaggtcaatggtataaaaggaaataccttcgtataaaaactagacagaatcattcccacaaactgcgttgtgatgtgttcgttgaactcacagagtttaacctttcttttcatagagcagttaggaaacagtctgtttgtaaattctgtaagtggatattctgacatcttgtggccttcgttggaaacgggatttcttcatattctgctagacagaagaattctcagaaacttccttgtgttttgtgttttcaactcacagagttgaacgatgctttacacagagtagacttgaaacactctttttgtgtaatttgcaagtggagatttcagccgctttgaggtcaatggtagaaaaggaaatatcttcgtataaaaactagacagaatgattctcagaaactcctttgtgatgtgtgcgttcaactcacagagtttaacctttcttttcatagagcagttaggaaacactctgtttgtaaagtctgcaagtggatattcagacctccttgaggccttcgttggatacgggatttcttcatattatgctagacagaagaattctcagtaacttccttgtgttgtgtgtattcaactcacagagttgaacgatcctttacacagagcagagttgaaacactctttttgtggaatttgcaagtggagatttcagccgctttgaggtcaatggtagaataggaaatatcttcctatagaaactagacagaatgattctcagaaaatcttttgtgatgtgtgcgttcaactcacagagtttaacttttcttctcatagagcagttaggaaacactctgtttgtaaagtctgcaagtggatattcagacctctttgaggccttcgttggaaacgggatttcttcatattatgcaagacagaataattctcagtaacttccttgtgttgtgtgtattcaactcacagagttgaaggatcctttacagagagcaggcttgaaacactctttttgtcgaatttgcaagtggagatttcagccgctttgaggtgaatggtagaataggaaatatcttcttatagaaactagacagaatcattctcagaaactgctctgcgatgtgtgcgttcaactctcagagtttaacttttcttttcattcagcagtttggaaacactctgtttgtaaagtctgcacgtggataatttgaccacttagaggccttcgttggaaacgggtttttttcatataaggctagacagaagaattcccagtatcttccttgtgttgtgtgcattcaactcacagagttgaacgttcctttagacagagcagattggaaacactctttttgtgcaatttgcaagtggagatttcaagcgctttaagggcaattgcagaaaaggaaatatcttcgtttcaaaactagacagaatcattcccacaaactgcgttgtgatgggtgcgttcaactcacagagtttaacctttcttttcatagagcagttaggaaacactctgtttgtaaagtctggaagtggatattctgacctctttgtggccttcgctggaaccgggatttcttcatataatactagacagaagaattctcagtaacttctttgtgttgtgtgtattcaactcacagagttgaacgatcctttacacagagcagacttgaaacactcgttttgtggaatttgcaagtggagatttcagccgctttgaggtccatggtagaaaaggaaatatcttcgtataaaaacttgacagaatgattctcatgaactcctttgtgatgtgtgcgttcaactcaaagagtttaacctttctgttcatagagcagttaggaaacactctgtttgtaaagtctgcaagtggatattcagacctccttgaggccttcgttggaaacgggatttcttcatattctgctagacagaagaattctcagtaacttccttgtgttgtgtgtattcaactcaaagagttcaacgatcctttatacagagcagacttgaaacactctttttgtggaatttgcaaatggagatctcagccgctttgtggtcagtagtagaaaaggaaatatcttcgtataaaaactagacagaatgattctcagaaacttctttgtgatgtgtgcgttcaactcacagagtttaacctttcttttcatagagcagttaggaaacactctgtttgtaaagtctgcaagtggatattcagacctctttgagcccttcgttggaaacgggtttttttcatttaaggctagacagaagaattctcagtaacttccttgtgttgtgtgtattcaactcaaagagttgaactttcatttagagagagcagatttgaaacactgtttttgtggaatttgcaagtggagatttcaagcgctttggggccaaaggcagaaaaggaaatatcttcgtataaaaactagacagaatcattctcagaaaactgctctgtgatgtgtgcgttcaactctcagagtttaacttttcttttcattcagcagtttggaaacactctgtttctaaagtctgcacgtggataatttgaccacttagaggccttcgttggaaacgggtttttttcatgtaaggctagacagaagaattcccagtaacttccttgtgttgtgtgcattcaactcacagagttgaacgttcccttagacagagcagatttgaaacactctatttgtgcaatttgcaagtgtagatttcaagcgctttaaggtcaacggcagaaaaggaaatatcttcgtttcaaaactagacacaatcattctcagaaactgctctgcgatgtgtgcgtgcaactctcagagtttaacttttcttttcattcagcagtttggaaacactctgtttgtaaagtctgcacgtggataacttgaccacttagaggccttcgttggaaacgggtttttttcatgtaaggctagacagaagaattctcagtaacttccttgtgttgtgtgtattcaactcacagagttgaacgatcgtttacacagagcagacttgtaacactctttttgtggaatttgcaagtggagatttcagccactttgaagtcaaaggtagaaaaggaaataacttcctataaaaactagacagaatgattctcagaaacttctttgtgatgtgtgcgttcaactcacagagtttaacctttcttttcatagagcagttaggaaacactctgtttgtaaactctacaagtggatattcacacctctttgaggccttcgttggaaacgggatttcttcatactgtgctagacagaagaattctcattaacttccttgtgttgtgtgtattcaactgacaaagttgaactttcatttagagagagcagatttgaaacactgtttttgtggaatttgcaagtggagatttcaagcgctttggggccaaaggcagaaaaggaaatatcttcgtataaaaactagacagaatcattctcagaaactgctccgtgatgtgtgcgttcaactctcagagtttaacttttcttttcattcagcggtttggaaacactctgtttgtaaagtctgcacgtggaaattttgaccacttagaggccttcgttggaaacgggattttttcatgtaaggctagacagaagaattccccgtaacttccttgtgttgtgtgcattcaactcacagagttgaacgttcccttagacagagcagatttgaaacactctatttgtgcaatttgcaagtgtagttttcaagctctttaaggtcaacggcagaaaaggaaatatcttcgtttcaaaactagacagaatcattcccacaaactgcgttgtgatgtgttcgttcaactcacagagtttaacctttctgttcatagagcagttaggaaacactctgtttgtaaagtctgtaagtggatattctgacatcttgtggccttcagttggaaacgggatttcttcatattctgctagacagaagaattctcagtaacttccttgtgttgtgtgtattcaactcacagagttgaacgatcctttacacagagcagacttgaaacactctttttgtggaatttgcaactggagatttcagccgctttgaggtcaatggtagaaaaggaaactatcttcatataaagactagacagaatgattctcagaaactcctttgtgatgtgtgcgttcaactcacagagtttaacctttcttttcatagagcagttaggaaacactctgtttgtaaagtctgcaagtggatattgagacatctttgaggctttcgttggaaacaggatttcttcatattctgctagacagaagaattctcagtaacttccttgtgttgtgtgtattaaactgacagagttgaactttcatttagagagagcagatttgtaaaactgtttttgtggaatttgcaagtggagatttcaagcgctttggggccaaaggcagaaaaggaattatcttggtataaaaactagacagaatcattctcagaaactgctctgcgatgtgtgcgttcaactctcagagtttaacttttcttttcattcagcagtttggaaacactctgtttgtaaagtctgcacgtggataacgtgaccacttagaggccttcgttggaaacgggtttttttcatgtaaggctagacagaagaattctcagaaacttccttgtgttgtgtgtattcaactcacagagttgaatgatcctttacacagagcagacttgaaacactctttttgtggaatttgcaagtggagatttcagccgctttgaggtcaatggtagaataggaaatatcttcctatggaaactagacagaatgattctcagaaactcctttgtgctgtgtgcgttcaactcacagagtttaacctttcttttcatagagcagttaggaaacactctgtttgttaagtctgcaggtggatattcagacctctttgaggccttcgttggaaaggggatttcttcatattatgctagacagaaagaattctcagtaacttccttgtgttgtgtgtattcaactgacagagttgaactatcatttagagagagcagatttgaaacactgtttttgtggaatttgcaagtggagatttcaagcgctttggggccaaaggcagaaaaggaaatatcttcgtataaaaactagacagaatgattctcagaaactcctttgtgatgtgggcgttcaactcacagagtttaacctttcttttcatagagcagttaggaaacactctgtttgtaaagtctgcaagtggatattcagacctctttgtggccttcattggaaacgggatttcttcatattctgctagagagaagtattctgagaaacttccttgcgttgtgtgtattcaactcacagagttcaacgatcctttacacagagcagacttgaaacactctttttgtggaatttgcaagtggagatttcagccgctttgaggtcaatggtagaataggaaatatcttcgtataaaaactagacagaaatgattctcagaaactcctttgtgatgtgtgcgttcaagtcacagagtttaacctttcttttcatagagcagttaggaaacactctgtttgtaaagtctgcaagtggatattcagacctctttgaggccttcgttggaaacgggatttcttcatattctgctagacagaagaattcccagtaacttccttgtgttgtgtgtcttcaactcacagagttgaactttcatttacacagagcagatttgaaacactctttttgtggaatttgcaaatggagatttcaagcgctttgaggccaaaggcagaaaaggaaatatcttcgtataaaaacttgacagaatcattctcagaaactgctctgcgatgtgtgcgtttaactctcagagtttaacttttcttttcattcagcagtttggaaacactctgtttgtaaagtctgcacgtggataatttgaccacttagaggccttcgttggaaacgggtttttttcatgtaaggctagacagaagaattctcagtaacttccttgtgttgtgtgtattcaactcacagagttgaacgatcctttacacagagcagacttgaaacattcttttggtggaatttgcaagtggagatttcagccgctttgaggtcaatggtagaataggaaatatcttcctatacaaactagacagagtgattctcagaaactcctttgtgatgtgtgcgttcaactcacagagtttaacctttcttttcatagagcagttaggaaacactctgtttctaaagtctgcaagtggatattcagacctctttgaggccttcgttggaaacgggtttttttcatataaggctagagagaagaattcccagtaacttccttgtgttgtgtgtgttccactcacagagttgaactttcgtttacacagagcagatttgaaacactctttttgtggaatttgcaagtggagatttcaagcgctttgaggccaaaggcagaaaaggaaatatcttcgtataaaaactagacagaatcattctcagaaactgctgcgtgatgtgtgcgttcaactctcagagtttaacatttcttttcattcagcggtttggaaacactctgtttgtaaagtctgcacgtggaaattttgaccacttagaggccttcgttggaaacgggtttttttcatgtaaggctagacagaagaattctcagtaacttccttgtgttgtgtgtattcaactcacagagttgaacgatcctttacacagagcagacttgtaacactctttttgtggaatttgcaagtggagatttcagccgctttgaagtcaaaggtagaaaaggaattatcttcctataaaaactagacagaatgattctcagaaactcctttgtgatgtgtgtgttcaactcacagagtttaacatttcttttcatagagcagttaggaaacactctgtttggaaagtctgcaagtggatattcagacctctttgaggccttcgttggaaacgggtttttttcatataaggctagacagaagaattctcagtaacttccttgtgttgtgtgtattcaactgacagagttgaactttcatttagagagagcagatttgaaactctgtttttgtggaatttgcaagtggagatttcaagggctttggggccaaaggcagaaaaggaaatatcttcgtataaaaactagacagaatcattctcagaaactgctgcgtgatgtgtgcgttcaactctcagagtttaacttttcttttcattcagcggtttggaaacactctgtttgtaaagtctgcacgtggataatttgaccacttagaggccttcgttggaaacgggttttttttcatgtaaggctagacagaagaattcccagtaacttccttctgttgtgtgcattcaactcacagagttgaacgttcccttagacagagcagatttgaaacactctatttgtgcaatttgcaagtatagatttcaagcgctttaaggtcaacggcagaaaaggaaatatcttcatttcaaaactagacagaatcattcccacaaactgcgttgtgatgtgttcgctcaacttacagagtttaacctttcttttcatagagcagttaggaaacagtctgtttgtaaattctgtaagtggatattctgacatcttgtggccttcgttggaaacgggatttcttcatattctgctagacagaagaattctcagtaacttccttgtgttgtgtttattcaactcacagagttgaatgatcctttacacagagcagacttgaaacactctttttgtggaaattgcaagtggagatttcagccgctttgaggtcaacggtagaaaagtaaatatcttcgtataaagactagacagaatgattctcagaaactcctttgtgatgtgtgcgatcaactcacagagtttaacctttcttttcatagagcagttaggatacactctgtttgtaaagtctgcaagtggatattcagacatccttgaggctttcgttggaaacgggatttcttcatattctgctagaaagaagaattcccagtaacttccttgtgttgtgtgtgttcaactcacagagttgaactttcatttacacagagcagatttgaaacactctttttgtggaatttgcaagtggaggtttcaagcgctttgaggccaaaggcagaaaaggaaatatcttcgtataaaaactagacagaatcattctcagaaactgctctgcgatgtgtgcgttcaactctcagagtttaacttttcttttcattcagcagtttggaaacactctgtttgtaaagtctgcacgtggataatttcaccacttagaggtcttcgttggaaacgggtttttttcatgtaaggatagacagaagaattcccagtaacttccttgtgttgtgtacattcaactcacagagctgaacgttcccttagacagagcagatttgaaacactctttttgtgcaattggcaagtggtgatttcagctgctttgaggtcaatggtagaaaagggaatatcttcgtataaaaactagacagaatcattcccacaaactgcgttgtgatgtgttcgttcaactcacagagtttaacctttctgttcatagagcagttaggaaacactgtgtttgtaaagtctgtaagtggatattctgacatcttgtggccttcgttggaaacgggatttcttcattttctgctagaaagtataattctcagtaacttccttgtgttgtgtgtattcaactcccagagttgaacgatcctttacacagagcagacttgaaacattctttttgtggaatttgcaagtggagatttcagctgctttgaggtcaatggtagaataggaaatatcttcctatagaaactagacagaatgattctcagaaagtcctttgtgatgtgtgcgttcaactcacagagtttaacctttcttttcatagagcagttaggaaacactctgtttgtaaagtctgcaagtggatattcagacctccttgaggccttcgttggaaacaggatttcttcatattctgctagacagaagaattctcagtaacttcccttgtgttgtgtgtattcaactcacagatttgaacgatcctttacagagagcagacttgaaacactctttttgtggaatttgcaagtggagatttcagctgctttgaggtcaatggtagaaaaggaaatatcttcgtagaaaaactagacagaatgattctcagaaacttctttgtgatgtgtgcgttcaactcacagagtttaacctttcttttcatagagcagttaggaaacactctgcttgtaaactctgcaagtggatattcagacctctttgaggccttcgttggaaacgggatttcttcatactatgctagacacaagaattctcagtaacttccttgtgttgtgtgtattcaactgacagagttgaactttcatttagacagagcagatttgaaacactctttttgtggaatttgcaagtagagatttcaagcgctttgagtccaaaggcagaaaaggaaatatcttcgtataaaaactagacagaatcattctcagaaactgctgcgtgatgtgtgcgttcaactctccgagtttaacttttcttttcattcagcggtttggaaacactctgtttgtaaagactgcacgtggatattttgaccacttagaggccttcgttggaaacgggttttttttcatgtaaggctagacagaagaattcccagtaacttccttgtgttgtgtgcattcaactcacagagttgaacgttcccttagacagagcagatttgaaacactctatttgtgcaatttgcaagtgtagatttcaagcgctttaaggtcaatggtagaaaaggaaatatcttcgtttcaaaactagacagaatcattcccacaaactgcgttgtgatgtgttcgttcaactcacagagtttaacctttcttttcatagagcagttaggaaacagtctgtttgtaaactctgcaagtggatattcagacctctttgaggccttcgttggaaacgggatttctccatactgtgctagacagaagaattctcagtaacttccttgtgttgtgtttattcaactcacagagctgaatgatcctttacacagagcagacttgaaacactctttttgtggaatttgcaagtggagatttcagccgctttgcggtcaatggtagaaaagtaaatatcttcgtataaagactagacagaatgattctcagaaactcctttgtgatgtgtgcgttcaactcacagagttcaacctttcttttcatagagcagttgggaaaccctctgtttgtaaagtctgcaagtggatattcagacttctttgaggccttcgttggaagcgggatttcttcatgttctgctagacagaaggattctcagtaacttccttgtgttgtgtgtattcaactcacagagttgaacgatcctttacacagagcagacttaaaacactctttttgtggaatttgcaagtggagatttcagccgctttgaggtcaatgttagaaaaggagatatcttcgtataaaaactagacagaatgattctcagaaactcctttgtgatgtgggcgttcaactcacagagtttaacctttcttttcatagagcagttaggaaacactctgtttgtaagattgcaagtggatattcagatatctttgaggctttcgttggaaacgggatttcttcatattctgctatacagaagaattctcagaaacttccttgtgttgtgtgtattcaactcacagagttgaacgatcgtttacacagagcagacttgagacactctgtttgtggaatttgtaagtggagatttcagccgctatgaggtcaatggtagaataggaaatatcttcctatagaaactagacagaatcattctcagaaactgctctgtgatgtgtgcgttcaactctcagagtttaacttttcttttcattcagcagtttggaaacactctgtttgtaaagtctgcacgtggataatttgaccacttagaggccttcattggaaaagggtttttttcatgtgaggctagacagaagaattcccagtaacttccttgtgttgtgtacattgaactcacagagttgaacgttcccttagacagagcagatttgaaacactctttttgtgcaattggcaagtggagatttcaagcgctttaaggtcaatggcagaaaaggaaatatcttcgtttcaaaactagacagaatcattcccacaaactgcgttgtgaggtgttcgttcaactcacagagtttaacctttcttttcatagagcagttaggaaacagtctgtttgtaaattctgtaagtggatattctgacatcttgtggccttctttggaaacgggatttcttcatattctgctagacagaagaattctcagtaacttccttgtgttgtgtgtattcaactcacagagttcaacgatcctttacacagagcagacttgaaacactctttttgtggaatttgcaagtggagatttcagccgacttgaggtcaatggtagaaaaggaaatatcttcttataaaaactagacagaatgattctcagaaactcctttgtgatgtgtgcgttcaactcacagagtttaacctttcttctcatagagcagttaggaaacattctgtttgtaaagtctgcaagtggatattcagacctctttgaggccttcgttggaaacgggatttcttcatattatgctagacagaagaattctcagtaacttccttgtgttgtgtgtattcaactcacagagttcaatgatcatttacacagagcagacttcaaacactctttttgtggaatttgcaagtggagatttcagccgacttgaggtcaatggtagaaaaggaaatatcttcgtataaaaactagacagaatgattctcagaaactcctttgtgatgtgtgcgttcaactcacagagtttcacctttcttttcatagagcagttaggaaacactctgtttctaaagtctgcaagtggatattcagacctctttgaggccttcgttggaaacgggtttttttcatataaggctagagagaagaattcccagtaacttccttgtgttgtgtgcgttcaactcacagagttgaactttcatttacacagagcagatttgaaacactctttttgtggaatttgcaagtggagatttcaagcgctttgaggccaaaggcagaaaaggaaatatcttcgtttcaaaactagacagaatcattctcagaaagtgctctgcgatgtgtgcgttcaactctcagagtttaacttttcttttcattcagcagtttggaaacactctgtttgtaaagtctgcgcgtggatattttgaccacttagaggccttcgttggaaacgggtttttttcttgtaaggctagacagaagaattcccaggaacttccatgtgttgtgtacattcaactcacagagttgaacgttcccttagacagagcagatttgaaacactctttttgtgcaattggcaagtggtgatttcagccgctttgaggtcaatggtagaaaaggaaatatcttcgtataaaaactagacagaatgattctcagaaacttcattgtgacgtgtgcgttcaactcacagagtttaacctttcttttcatagagcagttaggaaacactctgtttgtaaagtctgcaagtggatattcagacctctttgaggccttcgttggaaacgggatttcttcctactgtgctagacagaagtattctcagtaacttccttgtgttgtgtgtattcaactcacagagttgaacgatcctttacacagagcagacttgaaacactgtttttgtggaatttgcaagtggagatttcaagcgctttgaggctaaaggcagaaaaggaaatatcttcgtttcaaaactagacagaatcattctcagaaactgctctgcgatgtgtgcgttcaactctcagagtttaacttttcttttcattcataagtttggaaacactctgtttgtaaagtctgcacgtggataacttgaccacttagaggccttcgttggaaacgggtttttttcatgtaaggctagacagaagaattctcagtaacttccttgtgttgtgtgtattcaactcacagagttgaacgatcctttacacagagcagactagaaacactctttttgtggaatttgcaagtggagatttcagcccctttgaggtcaaaggtagaaaaggaaatatcttcgtataaaaactagacagaatgattctcagaaactcctttgtgatgtgtgcgttcaactcacagagtttaacctttcttttcatagagcagttgggaaacactctgtttgtaaagtctgcaagtggatattcagacatccttgaggctttcgttggaaacgggatttcttcatattctgctagaaaggagaattcccagtaacttccttgtgttgtgtgtgttcaactcacagagttgaactttaatttacgcagagcagatttgaaacactctttttgtggaatttgcatttggagatttcaagcgctttgaggccaaaggcagaaaaggaaatatcttcgtataaaaactagacagaatcattctcagaaactgctctgtgatgtgtgcgttcaactctcagagtttaacttttcttttcattcagcagtttggaaacactctgtttgtaaagtctgcaagtggataatttgaccacttagaggccttcgttggaaacgggtttttttcatgtaaggctagacagaagaattctcagtaacttccttgtgttgtgtgtattcaactcacagagttgaacgatcctttacacagagcagaattgaaacactgtttttgtggaatttacaagtggagatttcagccgctttgaggtcaatggtagaaaaggaaatatcttcctatagaaactagacagaatgattctcagaaactcctttgtgatgtgtgcgttcaactcacagagtttaacctttcttttcatagagcagttaggaaacactctctttgtaaagtctgcaagtggatattcagacatctttgaggctttcgttggaaacgggatttcttcatattctgctagacagaagaattctcagtaacttccttgtgttgtgtgtattcaactcacagagttgaactttcattcacacagagcagatttgaaacactctttttatggaatttgcaagtggagatttcaagcgctttgaggccaaaggcagaaaaggaaatatcttcgtttcaaaactagacagaatcattctcagaaactgctctgcgatgtgtgcgttcaactctcagagtttaacttttcttttcattcagcagtttgaaaacactctgtttgtaaagtctgcacgtggatattttgaccacttagaggtcttcgttggaaacgggtttttttcctgtaaggctagacagaagaattcccagtaacttccttgtgttgtgtacattcaactcacagagttgaacgtttccttagacagagcagatttgaaacactctttttgtgcaattggcaagtggtgatttcagccgctttgaggtcaatggtagaaaaggaaatatcttcgtataaaaactagacagaatcattcccacaaactgcgttgtgatgtgttcgttcaactcacagagtttaacctttcttttcatagagcagttaggaaacagtctgtttgtaaattctttaagtggatattctgacatcttgtgaccttcgttggaaacgggatttcttcatattctgctagacataagaattctcagtaacttccttgtgttctgtgtattcaactcacagagttgaaccatcctttacacagagcagacttgaaacactctttttgtggaatttgcaagtggagatttcagccgctttgaggtcaatggtagaaaaggaaatatcttcgtataaagactagacagaatgattctcataaactcctttgtgatgtgtgcgttcaattcacagagtttaacctttcttttcatagagcagttaggaaacactctgtttgtaaagtctgcaagtggatattcagacatccttgaggccttcgttggaaacgggatttcttcatattctgctagacagaagaattctcagaatcttccttgtgttgtgtgtattcaactcacagagttgaacgatcctttacacagagcagacttgaaacactctttttgtggaatttccaagtggagatttcagccgctttgaggtccatggtagaaaaggaaatatcttcgtataaaaactagacagaatgattctcagaaactcctttgtgatgtgtgcgttcaactcacagagtttaacctttctttccatagagcagttaggaaacactctgtttgtaaagtctgcaagtggatattcagacctccttgaggccttcgttggaaacgggatttcttcatattatgctagacacaagaattcccagtaacttccttgtgatgtgtgtgttcaactcacagagttgaactttcatttacacagagcagatttgaaacactctttttgtggaatttgcaagtggagatttcaagcgctttgaggccaaaggccgaaaaggaaatatcttcgtataaaaactacacagaatcattctcagaaactgctctgtgatgtgtgcgttcaactctcagagtttaacttttcttttcattcagcagtttggaaacactctgtttttaaagtctgcacgtggataatttgaccacttagaggccttcgttggaaacgggatttttcatgtaaggctagacagaagaattcccagtaacttccttgtgttgtgtacattcaactcacagagttgaacgttcccttagacagagcagatttgaaacactctttttgtgcaattggcaagtggtgatttcagccgctttgagatcaatggtagaaaaagaaatatcttcgtataaaaactagacagaatcattcgcacaaactgcgttgtgatgtgttcgttcaactcacagagtttaacctttcttttcatagagcagttaggaaacagtctgtttgtcaattctgtaagtggatattctgacatcttgtggccttcgttggaaacgggatttcttcataatctgctagacagaagaattctcagaatcttccttgtgttgtgtgtattcaactcacacagttgaacgattgtttacacagagcagatttgaaacactctttttgtggaatttgcaagtggagatttcagccgctttgaagtcaaaggtagaaaagggaatatcttcctataaaaactagacagaatgattctcagaaactcctttgtgatgtgtgcgttcacctcacagagtttaacctttctgttcatagagcagttaggaaacactctgtttgtaaagtctgcaagtggatattcagacctctttgaggccttcgttggaaacgggatttcttcatattctgctagacagaagaattctcagtaacttccttgtgttgtgtttattcaactgacagagttgaactttcatttagagagagcagatttgaaacactgtttttgtggaatttgcaagtggagatttcaagcactttggggccaaaggcagaaaaggaaatatcttcgtataaaaactagacagaatcattctcagaaactgctctgcgatgtgtgcattcaactctcagagtttaacttttcttttcattcagcagtttggaaacactctgtttgtaaagtctgcacgtggatattttgaccacttacaggccttcgttggaaacgggtttttttcctgtaaggctagacagaagaattcccagtaacttccttgtgttgtgtgcattcaactcacagagttgaacgttcccttagacagagccgatttgaaacactctatttgtgcaatttgcaagtgtagatttcaagcgctttaaggtcaatggcagaaaaggaaatatcttcgtctcaaaactagacagaatgattcccataaactcctttgtgatgtgtgcgttcaacacacagagtttaacctttctgttcatagagcagttaggaaacactctgtttgtaaagtctgtaagtggatattctgacatcttgtggccttcgctggaaacgggatttcttcatattctgctagacagaagaattctcagtaacttccttgtgttgtgtgtattcaactcacagagttgaacgatcctttacacagagcagacttgaaacacactttttgtggaatttgcaagtggagatttcagccgctttgaggtcaatggtagaaaaggaaatatcttcgtataaagactacacagaatgattctcagaaaatcttttgtgatgtgtgcgttcaactcacagagtttaacttttcttctcatagagcagttaggaaacactctgtttgtaaagtgtgcaagtggatattcagacctctttgaggtcttcgttggaaacgggatttcttcatattatgctagacagaagaattcccagtaacttccttgtgttgtgtgtgttcaactcacagagttaaactttgatttacacagagcagatttgaaacactctttttgtggaatttgcaagtggagatttcaagcgctttgaggccaaaggcagaaaaggagatgtcttcgtataaaaactagacagaatcattctcagaaactgctctgcgatgtgtgcgttcaactctcagagtttaacttttcttttcattcagcagtttggaaacactctgtttgtaaagtctgcacgtggacattttgaccatttagaggccttcgttggaaacgggtttttttcttgtaaggctagacagagaattcccagtaacttccttgtgttgtgtgcattcaactcacagagttgaacgttcccttagacagagcagatttgaaacactctatttgtgcaatttgcaagtgtagatttcaagcgctttaaggtcaatggcagaaaaggaaatatcttcgtttcaaaactagacagaatcattcccacaaactgcgttgtgatgtattcgttcaactcacagagtttaacctttctgttcatagagcagttaggaaacactctgtttgtaaagtctgtaagtggatattctgacatcttgtggccttcgttggaaacgggatttcttcatattctgctagacagaagaattctcagtaacttccttgtgttgtgtgtattcaactcacagagttgaacgatcctttacacagagcagacttgaaacactctttttgtggaatttgcaagtggagatttcagccgctttgaggtcaatggtagaaaaggaaatatcttcgtataagaactagacagaatgattctcagaaactcctttatgatgtgtgcattcaactcacagagtttaacctttcttttcatagagcagttaggaaacactctgtttgtaaagtctgcaagtggatattcagacctctttgaggctttcgttggaaacgggatttcttcatattctgctagacagaagaattctcagaaacttcattgtgttgtgtgtattgaactcaaagagttgaacgatcctttacacagtgcagacttgaaacactctttttgtggaatttgcaagtggagatttcagccgctttgaggtcaatggtagaataggaaatatcttcctataggaactagacagagaatcttctcagaaactgctctgcgatgtgtgcgttcaactctcagagtttaacttttcttttcattcagcagtttggaaacactctgtttgtaaagtctgcacgtggataacttgaccacttagaggccttcgttggaaacgggtttttttcatgtaaggctagacagagaattctcagtaacttccttgtgttgtgtgtattcacctcacagagttgaacgatcctttacacagagcagacttgtaacactctttttgtggaatttgcaagtggagatttcagccgctttcaagtcaaaggtagaaaaggaaatatcttcctataaaaactagacagaataattcccacaaactgcgttgtgatgtgttcgttcaactcacagagtttaacctttgttttcatagaggagttaggaaacagtctgtttgtaaattctgtaagtggatattgtgacatcttgtggccttcgttggaaacgggatttcttcatattctgctatacagaagaattctcagtaacttccttgtgttgagtgtattcaactcacagagttgaacgatcctttacacagagcagacttgaaacactctttttgtggaatttgcaagtggagatttcagccgctttgaggtcaatagtagaaaaggaaatatcttcgtagaaaaactaggcagaatgattctcagaaaatcctttgtgatgtgtgtgttcaactcacagagtttaacttttcttttcatagagcagttaggaaacactctgtttgtaaagtctgcaagtggatattcagacctctttgaggccttcgttggaaacgggatttcttcatattatgctagacagaagaattctcagtaacttccttgtgttgtgtgtattcaactgacacagttgaactttcatttagagagagctgatttgaaacactgtttttgtggaatttgcaagtggagatttcaagcgctttggggccaaaggcagaaaaggaaatatcttcgtataaaaactagacagaatcattctcagaaactgctgcgtgatgtgtgcgttcaactctcagagtttaacttttcttttcattcagcgggttggaaacactctgtttgtaaagtctgcacgaggatattttgaccccttagaggccttcgttggaaacgggtttttttcatgtaaggctagacagaagaattcccagtaacttccttgtgttgtgtgcattcaactcacagagttgaacgttcccctagacagagcagatttgaaacactctatttgtgcaatttgcaagtgtagatttcaagcgctttaaggtcaatggcagaaaaggaaatatcttcgtttcaaaactagacagaatcattcccacaaactgcgttgtgatgtgttcgttcaactcacagagtttaacctttctgttcatagagcagttaggaaacactctgtttgtaaagtctgcaagtgggtattcagacctccttgaggacttcgttggaaacgggatttcttcatattctgctagacagaagaattctcagaatcttcccttgtgttgtgtgtattcaactcacagagttgaacgatggtttacacagagcagatttgaaacactcttttggtggaatttgcaagtggagatttcagccgctttgaggtcaatggtagaaaaggaaatatcttcgtataaaaactagacagagtgattctcagaaacttctttgtgatgtgtgcgttcaactcacagagtttaacctttcttttcatagagcagttaggaaacactctgtttgtaaactctgcaagtggatattcagacctctttgaggccttcgttggaaacgggatttcttcatactatgctagacagaagaattcccagtaacttccttgtgttgtgtgtgttcaactcacagagttgaactttcatttacacagagcagatttgaaacactctttttgtggaatttgcaagtggagatttcaagcgctttgaggccaaaggcagaaaaggaaatatcttcgtataaaaactagacagatcattctcagtaaactgctgcgtgatgtgtgcgttcaagtctcagagtttaacttttcttttcattcagcggtttggaaacactctgtttgtaaagactgcacgtggatattttgaccacttagaggccttcgttggaaacgggttttttttcatgtaaggctagacagaagaattctcagtaacttccttgtgttgtgtgtattcaactcacagtgttgaacgatcctttacaaagagcagacttgaaacactctttttgtgaaatttgcaagtggagatttctgccgctttgaggtcaatggtagaataagaaatatcttcctatagaaactagacagaatgattctcagaaactcctttgtgatgtgtgcgttcaactcacacagtttaacctttcttttcatagagcagttaggaaacactctgtttgtaaagtctgcaagtggatatacagacctctttgaggccttcgttggaaaggggatttcttcatatgatgctagacagaagaattcccagtaacttccttgtgttgtgtgtgttcaactcacagagttgaactttcatttacacagagcagatttgaaacactctttttgtggaatttgcaaatggagatttcatgcgctttgaggccaaaggcagaaaaggaattatcttcgtataaaaactagacagaatcattctcagaaactgctctgcgatgtgtgcattcaactctcagagtttaatttttcttttcattcagcagtttggaaacactctctttgtaaagtctgcacgtggatattttgaccacttagaggccttcgttcgaaacgggttttattcttgtaaggctagacagaagaattcgcagtaacttctttgtgttgtgtacattcaactcacagagttgaacgttcccttagacagagcagatttgaaacactctttttgtgcaattggcaagtggagatttcaagcgctttaaggtcaatggcagaaaaggaaatatcttcgtttcaaaactagacagaatcattcccacaaactgcgttgtgatgtgttcgttcaactcacagagtttaacctttcttttcatagagcagttaggaaacagtctgtttgtcaattctgtaagtggatattctgacatcttgtggccttcgttggaaacgggattttttcatattctgctagacagaggaattctcagtaacttcctttttttgtgtgtattcaactcacagagttgaacgatcctttacacagagcagacttgaaacactctttttgtggaatttgcaagtggagatttcagccgctttgaggtcaatggtagaataggaaatatcatcgtagaaaaactagacagaatgattctcagaaactcctttgtgatgtgtgcgttcaactcacagtgtttaacttttcttttcatagaacagttaggaaacactctgtttgtaaagtctgcaagtggatattcagacctctttgaggccttcgttggaaacgggatttcttcatattctgatagacagaagaattctcagtaacttccttgtgttgtgtgtattcaactcacagatttcaacgatcctttacacagagcagacttgaaacactctttttgtggaatttgcaggtggagatttcagccgctttttgttcaatggtagaataggaaatatcttcctatagaaactagacagaatgattctcagaaactcctttgtgatatgtgcgttcaactcacagagtttaacctttcttttcatagagcagttaggaaacactctgtttgtaaagtctgcaagtggatattcagacctctttgaggctttcgttggaaacgggatttcttcatattctgctagacagaagaattctcagtaacttccttgtgttgtgtgtattcaactcacagagttgaacgatcctttacacagagaagacttgaaacactctttttgtggaatttgcaataggagatttcagccgctttgaggtcaatagtagaaaaggaaacatcttcgtagaaaaactagacagaatgattctcagaaactcctttgggatgtgtgcgttcaactcacagagtttaacctttcttttcatagagcagttaggaaacactcagtttgtaaagtctgcaagtggatattaagacctctttgaggccttcgttggaaacgggatttcttcatattctgctagacagaagaattcccagtaacttccttgtgttgtgtgtgttcaagtcacagagttgaactttcatttacacagagaagatttgaaacactctttttgtggaatttgcaagtggagatttcaagcgctttgaggccaaaggcagaaaaggaaataacttcgtttcaaaactagacagaatcattctcagaaactgctctgcgatgtgtgcgttcaactctcagagtttaacttttcttttcattcagcagtttggaaacactctgtttgtaaagtctacacgtggataacttgaccacttagaggccttcgttggaaacgggtttttttcatgtaaggctagacagaagaattcccagtaacttccttgtgttgtgtacattcaactcacagagttgaacgttaccttagacagagcagatttgaaacactctttttgtgcaattggcaaatggagatttcaagcgctttaaggtcaatggcagaaaaggaaatatcgtcgtttcaaaactagacagaatcattcccacaaactgcattgtgatgtgtttgttcaactcacagagtttaacctttctgttcatagagcagttaggaaacactctgtttgtaaagtctgtaagtggatattctgacatcttgtggccttcgttggaaacgggatttcttcatattctgctagacagaagaattctcagtaacttccttgtgttgtgtgtattcaactcacagagttcaacgatcctttacacagagcagacttgaaacactctttttgtggaatttgcaagtggagatttcagccgctttgtggtcaaaggtagaataggaaatatcttcctatagaaactagacagaatgattctcagaaacttctttgtgatgtgtgcgttcaactcacagagtttaacttttcttttcatagagcagttaggaaacactctgtttgtaaactctgcaagtggatattcagacctctttgaggccttcgctggaaacgggatttcttcatactgtgctagacagaagaattctcagtaacttcattgtgttgtgtgtattcaactcacagatttcaacgatcctttacacagagcagacttgaaacactctttttctggtatttgcaagtggagatttcagccgctttgaggtcaatggtagaaaaggaaatatcttcgtataaaaactagacagagtgattctcagaaactcctttgtgatgtctgcgtttaactcacagagtttaaccattcttttcatagagcagttaggaaacactctgtttgtaaagtgtgcaagtggattttcagacctccttgaggccttcgttggaaacgggatttcttcatattatgctagacagaagaattctcagtaacttccttgtgttgtgtgtattcaactcacagagttgaacgatcctttacacagagcagacttgtaacactctttttgtggaattcgcaagtggagatttcagcagatttgaagtcaaaggtagaaaaggaaatatcttcctataaaaactagacagaatgattctcagaaactcctttgtgatgtgtgtgttcaactcacacagtttaacctttcttttcatagagcagttaggaaacactctgtttgtaaagtctgcaagtggatattcagacctctttgaggccttcgttggaaacgggtttttttcatataaggctagacagaagaattctcagtaacttccttgtgttgtgtgtattcaactcacagagttgaatgatcctttacacagagcagacttgaaacactctttttgtggaatttgcaagtggagatttcagccgctttgtggtcaatggtagaaaaggaaatatcttcgtataaagactagacagaatgattctcagaaactcctttgtgatgtgtgcgttgaactcacagagtttaacctttcttttcatagagcagttaggaaacactctgtttgtaaagtctgcaagtggatattcagacctctttgaggccttcgttggaaacgggtttttttcatataaggctagacagaagaattctcagtaacttccttgtgttgtgtgtattctactcacagagttgaacgatcctttacacagagcagacttgaaacactctttttgtggaatttgcaagtggagattttagccgctttgaggtcaatggtagaaaaagaaatatcttcgtataaagactagacagaatgattctcagaaactcctttgtgatgtgtgtgttcaactcacagagtttaacctttcttttcatagagcagttagtaaacactccgtttataaagtctgcaagtggatattcagacccctttgaggccttcgttggaaacggcatttcttcatattatgctagacagaagaattctcagtatcttccttgtgttgtgtctattcaactcacagagttgaacgatcctttacacagagcagacttgaaacacccttttggtggaatttgcaagtggagatttcagccgctttgaggtcaatggtagaataggaaatatcttcctatagaaactagacagaatgattctcagaaactcctttgtgatgtgtgcattcaactcacagagtttaacctttcttttcatagagcagttaggaaacactctgtttgtaaagtctgcaagtggatattcagacctccttgaggccttcgttggaaacgggatttcctcatattctgctagacagaagaattctcagtaactaccttgtgttgtgtgtattcaactcacagagttgaacgatcctttacagagagcagacttgaaacactctttttgtggaatttgcaagttgagatttcagccgctttgaggtcaatggtagaataggaaatatcttcctatagaaactagacagaatgatactcagaaactcctttgtgatgtgtgcgttcaagtcacagagtttaacctttcttttcatagagcagttaggaaacactctgtttgtaaagtctgcaagtggatattcagacctctttgaggccttcgttggaaacgggtttttttcatataaggctagacagaagaattcccagtaacttccttgtgttgtgtgtgttcaactcacagagttgaactttcatttacacagagcagatttgatacactctttttgtggaatttgcaaatggagatttcaagcgctttgaggccaaaggcagaaaaggaaatatcttcgtataaaaactagacagaatcattctcagaaactgctctgcgatgtgtgcgtttaactctcagagtttaacttttcttttcattcagcagtttggaaacactctgtttgtaaaatctgcacgtggataatttgactacttagaggccttcgttggaaactggtttttttcatgtaaggctagacagaagattctcagtaacttccttgtgttgtgtgtattcaactcacagagttgaacgatcctttacacagagcagacttgaaacactctttttgtggaatttgcaagtggagatttcagccgcgttgaggtcaatggtagaaaaggaaatatcttcgtataaaaactagacagaatgattctcagaaactcctttgtgatgtgtgcgttcaactcacagagtttaacttttcttttcatagagcagttaggaaacactctgtttgtaaagtctgcaagtggatatgtcagacctctttgaggccttcgttggaaacgggatttcttcgtattctgctagacagaagaattctcagtaacttccttgtgttgtgtgtaatcaactgacagagttgaactttcatttagagagagcagatttgtaacactgtttttgtggaatttgcaagtggagatttcaagcgctttggggccaaaggcagaaatggaaatatcttcgtataaaaactagacagaatcattctcagaaactgctctgcgatgtgtgcgttcaactctcagagtttaacttttcttttcattcagcagtttggaaacactctgtttgtaaagtctgcacgtggatattttcaccatttagaggccttcgttggaaacgggtttttttcttgtaaggctagacagaagaattcccagtaacttccttgtgttgtgtacattcaactcacagagttgaacgttcccatagacagagcagatttgaaacactctttttgtgcaattggcaagtggagatttcaagtgctttaaggtcaatggcagaaaaggaaatatcttcgtttcaaaactagacagaatcattcccacaaactgcgttgtgatgtgttcgttcaactcacagagtttaacctttctgttcatagagcagttaggaaacactctgtttgtaaagtctacaagtggatattcagacctccttgaggccttcgttggaaacgggatttcttcatattctgctagacagaagaaatctcagaatcttccttgtgttgtgtgtattcaactcacagagttgaacgatcctttacacagagcagacttgaaacactctttttgtggaatttgcaagtggagatttcagccgctttgaggtccatggtagaaaaggaaatatcttcgtataaaaactagacagaatgattctcagaaactcctttgtgatgtgtacgttcaactcacagagtttaacctttcttttcatagagcagttaggaaacactctgtttgtaaagtctgcaagtggatattgagacctctttgaggcgttcgttggaaacgggttttgttcatataaggctagacagaaagaattctcagtaacttccttgtgttgtgtgtattcaactcacagagttgaacgatcctttacacagagcagacttgtaacactctttttgtggaatttgcaagtggagatttcagccgctttgaagtcaaaggtagaaaaggaaatatcttcctataaaaactacacagtaatgattctcagaaactcctttgtgatgtgtgcgttcaactcacagagtttaacctttcttttcatagagcagttaggaaacactctgcttgtaaagtctgcaagtggatattcagccctctttgaggccttcgttggaaacgggtttttttcatataaggctagacagaagaattctcagtaacttcccttgtgttgtgtgtattcaactgacagagttgaactttcatttagagagagcagatttgaaacactgtttttgtggaatttgcaagtggagatttcaagtgctttggggccaaaggcagaaaacgaaatatcttcgtataaaaagtagacagaatcattctcagaaactgctctgcgatgtgtgcgttcaactctccgagttcaacttttcttttcattcagcagtttggaaacactctgtttgtaaagtctgcacgtggataatttgactacttagaggccttcgttggaaacgggtttttttcatgtaaggctagacacaagaattcccagtaacttccttgtgttgtgtacattcaactcacagagttgaacgttcccttagacagagcagatttgaaacactctttttgtgcaattggcaaatggagatttcaagcgctttaaggtcaatggcagaaaaggaaatatcttcgtttgaaaactagacagaatcattcccacaaactgcgttgtgatgtgttcgttcaactcacagagtttaacctttctgttcatagagcagttaggaaaaactctatttgtaaagtctgtaagtggatattctgacatcttgtggccttcgttggaaacgggatttcttcatattctgctagacagaagaattctcacaatcttccttgtgttgtgtgtattcaactcacagagttgaacgatggtttacacagagcagatttgaaacactctttttgtggaatttgcaagtggagatttcagccgctttgaggtcaatggtagaaaaggaaatatcttcgtataaaaactagacagaatgattctgagaaactactttgtgatgtgtgcgttcaactcacagagtttaacttttcttttcatagagcagttaggaaacactctgtttgtaaagcctgcaagtggatattcagacctccttgaggccttcgttggaaacgggatttcttcatattatgctagacagaagaattctcactaacttccttgtgttgtgtgtattcaactcacagagttgaacgatcctttacacagagcagactttaaacactctttttgtggaatttgcaagtggagatttcagccgctttgaggtcaacggtagaaaaggaaatatctccgtataaagactagacagaatgattctcagaaactcctttgtgatgtgtgcgttcaactcacagagtttaacttttcttttcatagagcagttaggaaacactccgtttgtaaagtctgcaagtggatattcagacctctttgaggccttcgttggaaacgggatttcttcatattatgctagacagaagaattcccagtaacttccttgtgttgtgtgtgttcaactcacagagttgaactttcatttacacagagcagatttgaaacactctttttgtggaatttgcaaatggagatttcaagagctttgaggccaaaggcagaaaaggaaatatcttcgtataaaaactagacagaatcattctcagaaactgctctgcgatgtgtgcgttcaactctcagagtttaactttgcttttcattcagcagtttggaaacactctgtttgtaaagtctgcacgtggataatttgaccacttagaggccttccttggaaacgggtttttttcatgtaaggctagacagaagaattctcagtaacttccttgtgctgtgtgtattcaactcacagagttgaacgatcctttacacagagtggacttgaaacactctttttgtggaatttgcaagtggagatttcagccgcgttgaggtcaatggtagaaaaggaaatatcttcgtataaaaactagacagaatgattctcagaaactcctttgtgatgtgtgcgctcaactcacagagtttaaactttcttttcatagagcagttaggaaacactctgtttgtaaagtctgcaagcggatattcagacctctttgaagccttcgttggaaacgggatttcttcatattctgctagacagaagaattcccagtaacttccttgtgttgtgtgtgttcaactcacagagttgaacgatcctttacacagagcagatttgaaacactctttttgtggaatttgcaagtggagatttcaagcgctttgaggccaaaggcagaaaaggaaatatcttcgtagaaaaactagacagaatgattctcagaaccttctttgtgatgtgtgcgttcaactcacagagtttaaactttcttttcatagagcagttaggaaacactctgtttgtaaactctgcaagtggatattcagacctctttgaggccttcgttggaaacgggatttcttcatactatgctagacagaagaattctcagaaacttccttgtgttgtgtgtattcaactcacagagtttaacgatcgtttacacagagcagacttgagacactctttttgtggaatttgtaagtggagatttcagccgctttggggtcaatggtagaaaaggaaatatcttcatgtaaaaactagacagaatcattctcagaaactgctctgtgatgtgtgcgttcaactctcagagtttaacttttctgttcattcagcagtttggaaacactctgtttgtaaagtctgcacgtggataatttgaccacttagaggccttcgttggaaacgggtttttttcatataaggctagacagaagaattctcagtaactttcttgtgttgtgtgtattcaactgacagagttgaactatcatttagagagtgcagatttgaaacactgtttttgtggaatttgtaagtggagacttcaagcgctttggggccaaaggcagaaaaggaaatatcttcgtataaaaactagacagaatcattctcagaaactgctctgcgatgtgtgcgttcaactctcagagtttaagttttcttttcattcagcagtttggaaacactctgtttgtaaagtctgcacgtggataatttgaccacttagaggccttcattggaaacgggtttttttcatgtaaggctagacagaataattctcagtaacttccttgtgttgtgtgtattcaactcacagagttgaacgatcctttacagagagcagacttgaaacactctttttgtggaatttgcaagtggagatttcagccgctttgaggtcaatggtagaaaacgaaatatcttcgtataaagactagacagaatgattctgagaaactcctttgtgatgtgtgcgttcaactcacagagtttaacctttcttttcatagagcagttaggaaacactctctttgtaaagtatgcaagtggatattcagacatccttgaagctttcgttggaaacgggatttcttcatattctgctagaaagaagaattctcagtaacttccttgtgttgtgtgtattcaactcacagagttgaatgatcctttacacagaacagtcttgaaacagtctttttgtggaatttgcaagtggagatttcagccgctttgaggtcaatggtggaataggaaatatcttcctatagaaactagacagaatcattgtcagaaactgctctgtgatgtgtgcgttcaactctcagagtttaacttttcttttcattcagtagtttggaaacactctgtttgtaaagtctgcacgtggatattttgaccacttagaggccttcgatggaaacggggttttttcatttaaggctagacagaagaattcccagtaacttccttgtgttgtgtgcattcaactcacagagatgaacgttcccttagacagagcagatttgaaacactctatttgtgcaatttgcaagtgtagatttcaagggctttaaggtcaatggcagaaaaggaaatatcttcgtttcaaaactagacagaatcattcccacaaactgcgttgtgatgtgttcgttcaactcacagagtttaacctttcttttcatagagcagttaggaaacagtctgtttgtcaattctgtaagtggatattctgatatcttgtggccttcgttggaaacgggatttcttcatattctgctagacagaagaattctcagaatcttccttgtgttgtgcgtattcaactcacagagttgaacgatcctttacacagagcagacttgaaacactctttttgtggaatttgcaagtggagatttcagccgctttgaggtccatggtagaaaaggaaatatcttcgtataaaaactagacagaatgattctcagaaactcctttgtgatgtgtgcgttcaacacacagagtttaacctttcttttcatagagcagttaggaaacactctgtttgtaaagtctgcaagtggatattcagacctccttgaggccttcgttggaaacgggatttcttcatattatgctagacagaagaattctcagtaacttccttttattgtgtgtattcaactcacagagttgaacgatcctttacacagagcagatttgaaacactctttttgtggaatttgcaagtggagatttcagccgctttgaggtcaatggtagaaaaggaaatatcttcgtataaaaattagacagaatgattctcagaaactcctttgtgatgtgtgcgttcaactcacagagtttaacctttcttttcatagagcagttaggaaacactctgtttgtaaagtctgcaagtggatattcagacctctttgaggctttcgttggaaactggatttcttcatattctgctagacagaagaattctcagtaacttccttgtgttgtgtgtattcaactcacagagttgaaagatcctttacagagagcagacttgaaacactctttttgtggaatttgcaagtggagatttcagccgctttgaagtcaatggtagaaaaggaaatatcttcgtataaagactagagagaatgattctcagaaactcctttgtgatgtgtgtgttcaactcacagagtttaacctttcttttcatagagcagttagtaaacactctgtttataaagtctgcaattggatattcagacccctttgaggccttcgttggaaacgggatttcttcatattatgctagacagaagaattcccactaactttccttgtgttgtgtgtgttcaactcacagagttgaactttcatttacacagagcagatttgaaacactctttttgtggaatttgcaagtggagatttcaagcgctgtgaggccaaaggcagaaaaggaagtatgcttcgtataaaaactagacagaatcattctaagaaactgctctgcgatgtgtgtgttcaactctcagagtttaacttttcttttccttcagcagtttggaaacactctgtttgtaaagtctgcacgtggataatttgaccacttagaggccttcgttggaaacgggtttttttcatgtaaggctagacagaagaattcccagtaacttccttgtgttgtgtgcattcaactcacagagttgaacgttcccttagacagagcagatttgaaacactctatttgtgcaatttgcaagtgtagatttcaagcgctttaaggtcaatggcagaaaaggaaatatcttcgtttcaaaactaggcagaatgattctcagaaactcctttgtgatgtgtgcgttcaactcacagagtttaacctttcttttcatagagcagttaggaaacactctgtttgtaaagtctgcaagtggatattcagacctccttgaggcctccgttggaaacgggatttcttaatattctgctagacagaagaattctcagtaacttccttgcgttgtgtgtattcaactcacagagttgaacgatcctttacacagagcagacttgaaacactctttttgtggaatttgcaaggggagatttcagccgctttgaggtcaatagtagaaaaggaaatatcttcgtatagaaactagacagaatgattctcagaaactcctttgtgatgtgtgcgttcaactcacagagtttaacctttcttttcatagagcagttacgaaacactgtgtttttaaactctgcaagtggatattcagacctctttgaggccttcgttggaaacgggtttcttcatactgtgctagacagaagaattctcagaatcttccttgtgttgtgtgtattcaactcacagagttgaacgatcgtttacacagagcagatttgaaacactcatttggtggaatttgcaagtggagatttcagccgctttgaggtcaatggtagaaaaggaaatatcttcgtataacaactagacagaatgattctcagaaactcctttgtgatgtgtgcgttcaactcacagagtttaacctttcttttcatagagcagttaggaaacactctgtttgtaaagtctgcaagtggatgttcagacctctttgaggccttcgttggaaaggggtttttttcatataaggctagacagaataattctcagtaagttccttgttttgtgtgtattcaactcacagagttgaaggatcctttacacagagcaggcttgaaacactctttttgtcgaaattgcaagtggagatttcagccgctttgaggtcaatggtagaataggaaatatcttcctatagaaactagacagaatgattctcagaaacttctttgtgatgtgtgcgttcaactcacagagtttaaacctttcttttcatagagcagttaggaaacactctgtttgtaaactctgcaagtggatattcagacctctttgaggccttctttgcaaacgggatttcttcatactatgctagacagaagaattgtcagtaactttccttgtgttgtgtgtattcaactcacagagttgaatgatcctttacacagagcagacttgaaacactctttatgtggaatttgcaagtggagatttcagccgctttgagttcaatggtagaataggaaatatcttcctatagaaactagacagaatgattctcagaaactcctttgtgatgtgtgcgttcaactcacagagtttaacctttcttttcatagagcagttaggaaacactccgtttgtaaagtctgcaagtggatattcagacctcttagaggccttcgatggaaacgggatttcttcatattctgctagacagaagaattctcagtaacttccttgtgttgtgtgtattgaactcacagagttgaacgatccttttcagagagcagacttgaaacactctttttgtggaatttgcaagtggagatttcagccgctttgaggtcaatggtagaaaaggaaatatcttcgtataaagactagacagaatgattctcagaaactcctttgtgatgtgtgtgtccaactcacagagtttaacctttcttttcatagagcagttaggaaacactctgtttgtaaagtctgcaagaggatattcagacctctttgaggccttcgttggaaacgggttttttccatataaggctagacagaagatttctcagaaacttcgttgtgttgtgtgttttcaaatcacagagttcaacgatcctttacacagagtagacttgaaacactctttttgtggaattggcagtgtggagatttcagccgcttttaggtcaatggtagaaaaggaaatatcttcgtataaaaactagacagaatcattctcagaaactgctgcgtgatgtgttcgttcaactctcagagtttaacttttcttttcattcagcggtttggaaacactctgtttgtaaagtctgcacgtggatattttgaccacttagaggtcttcgttggaaacgggtttttttcatgtaaggctagacagaagaattctcagtaactgccttgtgttgtgtgtattcaactcacagagttgaacgatcctgtacacagagcagacttgaaacactccttttgtggaatttgcaagtggagatttcagccgctttgaggtcaatggtagaataggaaatatcttcctatagaaactagacagaatgattctcagaaactcctttgtgatgtgtgcgttcaactcacagagtttaaccgttcttttcatagagcagttaggaaacactctgtttgtaaagtctgcaagtggatattcagacatctttgaggctttctttggaaacgggatttcttcatattctgctagacagaagaattctcagaaacttccttgtgttgtgtgtattcaactcacagagttgaacgatcctttactcagagcagacttgaaacactccttttgtggaatttgcaagtggagattccagccgctttgaggtcaatggtagaataggaaatatcttcctatggaaactagacagaaatcattctcagaaaactgctctgcgatgtgtgcgttcaactctcagagtttaacttttcttttcattcagcagtttggaaacactctgtttgtaaagtctgcacgtggatattttgaccacttagaggccttcgttggaaacgggtttttttcctgtaaggctagacagaagaattcccagtaacttccttgtgttgtgtacattcaactcacagagttgaacgttcccttagacagagcagatttgaaacactctttttgtgcaattggcaaatggagatttcaagcgctttaagttcaatggcagaaaaggaaatatcttcgtttcaaaactagacagaatcattcccacaaactgcgttgtgatgtgttcgttcaactcacagagtttaacctttctgttcatagagcagttaggaaacactctgtttgtaaagtctgtcagtggatattctgacatcttgtggccttcgttggaaacgggatttcttcatattctgctagacagaagaattctcagtaacttccttgtgttgtgtgtattcaactcacagagttgaacgatcctttacacagagcagacttgtaacactctttttgtggaatttgcaagtggagatttcagccgctttgaggtccatggtagaaaaggaaatatcttcctataaaaactagacagaatgattctcagaaacttctttgtgatgtgtgcgttcaactcacagagtttaacctttcttttcatagagcagttaggaaacactctgtttgtaaactctgcaagtggatattcagacctctttgaggccttcgttggaaacgggatttcttcattctatgctagacagaagaattctcagtaactttccttgtgttgtgtgtattcaactcacagagttgaacgatcctttacacagagcagacttgaaacactctttttctggaatttgcaagcggagatttcagctgcgttgaggtcaatggtagaaaaggaaatatcttcgtataaaaactagacagaatgattctcagaaactcctttgtgatgtgtgcgttcaactcacagagtttaacctttcttttcatagagcagttaggaaacactctgtttgtaaagtctgcaagtggatattcagacctctttgaggccttcgttggaaacgggtttttttcatatacggctagacagaagaattctcagtaacttccttgtgttgtgtgtattcagctgacagagttgaactttcatttagagagagcagatttgaaacactgtttttgtggaatttgcaattggagatttcaagcgctttggggccaaaggcagaaaaggaaatatcttcgtaaaaaactagacagaatgtttctcagaaacttctttgtgatgtgtgcattcaactcacagagtttaacctttcttttcatagagcagttaggaaacactgtgtttgtaaagtctgcaagtggatattcagacctctttgaggccttcgttggaaacgggatttcttcatactgtgctagacagaagaattctcagtaacttccttgtgttgtgtgtattcaactcacagagttgaacgatcctttacacagagcggacaggaaacactctttttctggaatttgcaagcggagatttcagctgcgttgaggtcaatggtagaaaaggaaatatcttcgtataaaaactagacagaatgattctcaggaaactcctttgtgatgtgtgtgttcaactcacagagtttaacctttcttttcatagagcagttaggaatcactctgtttgtaaagtctgcaagtggatattcagacctctttgaggccttcgttggaaacgggtttttttcatataaggctagacagaagaattctcaataacttccttctgttgtgtgtattcaactgacagagttgaactttcatttagagagagcagatttgaaacactgtttttgtggaatttgcaagtggagatttcaagcgctttggggccaaaggaagaaaaggaaatatcttcgtataaaaactagacagaatcattctcagaaactgcagcgtgatgtgtgcgttcaactctcagagtttaacttttcttttcattcagcggtttggaaacactctgtttgtaaagtctgcacgtggatattttgaccacttagaggccttcgttggaaacgggtttttttcatgtaaggctagacagaagaattcccagtaacttccttgtgttgtgtgcattcaactcacagagttgaacgttcccttagacagagcagatttgaaacactctatttgtgcaatttgcaagtgtagatttcaagcgctataaggtcaacggcagaaaaggaaatatcttcgtttcaaaactagacagaatcattcccacaaactgcgttgtgatgtgttcgttcaactcacagagtttaacctttcttttcatagagcagttaggaaacagtctgtttgtaaattctgtaagtggatattctgacatcttgtggccttcgttggaaacgggatttcttcatattctgctaggcagaagaattctcagtaacttccttgtgttgtgtttattcaactcacagagttgaatgatcctttacacagagcagacttgaaacactctttttgtggaatttgcaagtggagatttcaaccgctttgaggtcaatggtagaaaagtaaatatcttcgtataaagactagacagaatgattctcagaaacttctttgtgatgtgtgcgttcaactcacagagtttaacctttcttttcatagagcagttaggaaaccctctgtttgtaaactctgcaagtggatattcagacctgtttgaggccttcgttggaaacgggatttcttcatactatgctagacagaagaattcccagtaacttccttgtgttgtgtgtgttcaactcacagaggtgaactttcatttacacagagcagatttgaaacactctttttgtggaatttgcaagtggagatttcaagcgctttgaggccaaaggcagaaaaggaaatatcttcgtataaaaactagacagaatcattctcagaaactgctctgcgatgtgtgcgttcaactctcagagtttaacttttcttttcattcagcagtttggaaacactctgtttgtaaagtctacacgtggataatttgaccacttagaggccttcgttggaaacgggtttttttcatgtaaggctagacagaagaattctcagtaacttccttgtgttgtgtgtattcaactcacagaggtgaacgatcctttacacagagcagacttgtaacactctttttgtggaatttgcaagtggagatttcagccgctttgaagtcaaaggtagaaaaggaaataacttcctataaaaactagacagaatgattctcataaactcctttgtgatgtgtgcgttcaactcacagagtttaacctttcttttcatagagcagttaggaaacactctgtttgtaaagtctgcaagtggatattcagacccctttgagtccttcgttggaaacgggatttcttcatattctgctagacagaagaattcccagtaacttccttgtgttgtgtgtgttcaactcacagagttgaactttcatttacacagagcagattggaaacactctttttgtggaatttgcaagtggagatttcaagcgctttgaggccaaaggcagaaaaggaaatatctttgtataaaaactagacagaatcattctcagaaactgctctgcgatgtgtgcgttcaactctcagagtttaacttttcttttccttcagcagtttggaaacactctgtttgtaaagtctgcacgtggataacttgaccacttagaggccttcgttggaaacgggtttttttcatgtaaggctagacagaagaattctcagtaacttccttgtgttgtgtgtattcaactcacagagttgaacgatcctttacacagagcagacttgaaacactctttttgtggaatttgcaagtggagatttcagccgctttgaggtcaatggtagaaaaggaaactttcttcgtataaagactagacagaatgattctcataaactcctttgtgatgtgtgcgttcaactcacagagtttaacctttcttttcatagagcagttaggaaacactctgtttgtaaagtctgcaagtggatattcagacatccttgaggccttcgttggaaacgggatttcttcatattctgctagacagaagaattcccagtaacttccttgtgttgtatgtgttcaactcacagagttgaactttcatttacacagagcagatttgaaacactctttttgtggaatttgcaaatggagatttcaagcgctttgaggccaaagacagaaaaggaaatatcttcgtataaaaactagacagaatcattctcagtaaactgctgcgtgatgtgtgcgttcaactctcagagtttaacttttcttttcattcagcggtttggaaacactctgtttgtaaagtctgcacgtggatattttgaccacttagaggccttcgttggaaacgggttttttgcatgtaaggctagacagaagaattcccagtaacttccttgtgttgtgtacattcaactcacagagttgaacgttcccttagacagagcagatttgaaacactctttttgtgcaattggcaaatggagatttcaagcgctttatgttcaatggcagaaaaggaaatatcttcgtttcaaaactagacagaatcattcccacaaactgcgttgtgatgtgttcgttcaactcacagagtttaacctttctgttcatagagcagttaggaaacactctgtttgtaaagtctgtaagtggatattctgacatcttctggccttcgatggaaacgggatttcttcatattctcctagacagaagattctcagaatcttccttgtgttgtgtgtattcaactcacagagttgaacgatcctttacacagagcagacttgaaacactctttttgtggaatttgcaagtggagatttcagccgctttgaggtccatggtagaaaaggaaatatcttcgtataaaaactagacagaatgattctcagaaaatcttttgtgatgtgtgccttcaactcacagagtttaacttttcttctcatagagcagttaggaaacactctgtttgtaaagtctgcaagtggatattcagacctctttgaggtcttcgttggaaacgggatttcttcatattatgctagacagaagaatcctcagtaacttccttgtgttgtgtgtattcaactcacagagttgaacgatcctttacacagagcagacttgaaacactctttttgtggaatttgcaagtggagatttcagccgctttgaggtcaatagtagaaaaggaaatatcttcgtagaaaaactagacagaatgattctcagaaactcctttgtgatgtgtgcgttcaactcacagagtttaacctttctttccatagagcagttaggaaacactctgtttgtaaagtctgcaagtggatattcagacctctttgaggccttcgttggaaacgggttttttccatataaggctagacagaagaattcccagtaacttccttgtgttgtgtgtgttccactcacagagttgaactttcgtttacacagagcagatttgaaacactctttttgtggaatttgcaaatggagatttcaagcgctttgaggccaaaagcagaaaaggaaatatcttcgtataaaaactagacagaatcattctcagaaactgctgcgtgatgtgtgcgttcaactctcagagtttaacttttcttttcattcagcgatttggaaaaactctgtttgtaaagactgcacgtggatattttgaccacttagaggccttcgttggaaacgggttttttttcatgtaaggctagacagaagaattctcagtaacttccttgtgttgtgtgtattcaactcacagagttgaacgatcctttaaacagagcagacttgaaacactctttttgtggaatttgcaattggagatttcagccgctttgaggtcaatagtagaaaaggaaatatcttcgtagaaaaactagacagaatgattctcagaaactcctttgaaatgtgtgcgttcaactcacagagtttaacctttcttttcatagagcagttaggaaacactctgtttgtaaagtctgcaagtggatattcagacctccttgaggccttcgttggaaacgggatttcttcatattatgctagacagaagaattcccagtaacttccttgtgttgtgtgtgttcaactcacagagttgaactttcacttacacagagcagatttgaaacactctttttgtggaatttgcaaatggagatttcaagcgctttgaggccaaaggcagaaaaggaaatatcttcgtataaaaactagacagaatcattctcagaaactgctctgtgatatgtccgttcaactctcagagtttaacttttcttttcattcagcagtttggaaacactctgtttgtaaagtctgcacgtggataatttgaccacttagaggccttcgttggaaacgggtttttttcatgtaaggctagacagaataattctcagtaacttccttgtgttgtgtgtattcaactcacagagttgaaggatcctttacagagagcaggcttgaaacactctttttgtcgaatttgcaagtggagatttcagccgctttgaggtcaatggtagaataggaaatatctttttatagaaactagacagaatgattctcagaaactcctttgtgatgtgtgcgttcaactcacagagtttaacctttcttttcatagagcagttaggaaacactctgtttctaaagtctgcaagtggatattcagacctgtttgaggccttcgttggaaacgggtttttttcatataaggctagagagaagaattcccagtaacttccttgtgttgtgtgtgttcaactcacagagttgaactttccttcacacagagcagatttgaaacactctttttgtggaatttgcaagtggagatttcaagcgctttgaggccaaaggcagaaaaggaaatatcttcgtataaaaactagacagaattattctcagaaactgctctgcgatgtgtgcgttcaactctcagagtttaacttttcttttcattcagcagtttggaaacactctgtttgtaaagtctgcacgtggatattttgaccacttagaggcctttgttggaaacgggttttttcctgtaaggctagacagaagaattcccagtaacttccttgtgttgtgtacattcaactcacagagttgaacgttcccttagacagagcagatttgaaacactctttttgtgcaactggcaagtggagatttcaagcgctttaaggtcaatggcagaaaaggaaatatcttcgtttcaaaactagacagaatcattcccacaaactgcgttgtgatgtgttcgttcaactcacagagtttaacttttctgttcatagagcagttaggaaacactctgtttgtaaagtctgtaagtggatattctgacatcttgtggccttcgttggaaacgggatttcttcatattctgctagacagaagaattctcagaatcttccttgtgttgtgtgtattcaactcacagagttgaacgatggtttacagagagcagatttgaaacactctttttgtggaatttgcaagtggagatttcagctgctttgaggtcaatggtagaaaaggaaatatcttcgtataaaaactagacagaatgattctcagaaactcctttgtgatgtgtgcgttcaactcacaggagtttaacctttcttttcatagagcagttaggaaacactctgtttgtaaagtctgcaagtggatattcagacctccttgaggccttcgttggaaacgggatttcttcctattatgctagacagaagaattctcagtaacttccttgtgttgtgtgtattcaactcacagatttgaacgatcctttacacagagcagacttgaaacactcttgttgtggaatttgcaagtggagatttcagccgctttgaggtcaatggtagaaaaggaaatatcttcctatagaaattagacagaatgattctcagaaactcctctgtgatgtgtgcgttcaactcacagagtttaacctttcttttcatagagcagttaggaaacactctgtttgtaaagtctgcaagtggatattcagacatctttgaggctttctttggaaaagggatttcttcatattctgctatacagaagaattctcagtaacttccttgtgttgtgtgtattcaagtgacagagttgaactttcatttacagagagcagatttgaaacactgtttttgtggaatttgcaagtggagatttcaagcgctttggggccaaaggcagaaaaggaaatatcttcgtataaaaactagacagaatcattctcagaaactgctgcgtgatgtgtgcgttcaactctcagagtttaacttttcttttcattcagcggtttggaaacactctgtttgtaaagtctgcacgtggaaattgtgaccacttagaggccttcgttggaaacgggtttttttcatgtaaggctagacagaagaattcccagtaacttccttgtgttgtgtgcattcaactcacagagttgaacgttcccttagacagagcagatttgaaacactctatttgtgcaatttgcaagtgtagttttcaagctctttaaggtcaacggcagaaaaggaaatatcttggtttcaaaactagacagaatcattcccacaaactgcgttgtgatgtgttcgttcaactcacagagtttaacctttctgttcatagagcagttaggaaacactctgtttgtaaagtctgtaagtggatattcagacatcttgtggccttcgttggaaacgggatttcttcatattctgctagacagaagaattctcagtaacttccttgtgttgtgtgtattcaactcacagagttgaacgatcctttacacagaggagacttgaaacactctttttgtggaatttgcaagtggagatttcagccgctttgaggtcaatggtagaaaaggaaaaatcttcgtatagaaacaagacagaatgattctcagaaactcctttgagatgtgtgtgttcaactcacagagtttaacctttgttttcatagaggagttaggaaacactctgtttgtaaagtctgcaagtggatattcagacctctttgaggccttcgttggaaacgggtttttttcatataaggctagacagaagaattctcagtaacttccttgtcttgtgtgtattcaactcacagagttgaacgatcctctacacagagcagacttgtaacactctttttgtggaatttgcaagtggagatttcagccgctttgaagtcaaaggtagaaaaggaaatatcttcctataaaaactagacagaatgattctcagaaactcctttgtgatgtgtgcgttcaactcacagagtttaacctttcttttcatagagcagttaggaaacactctgtttgtaaagtctgcaagtggatattcagacatccttgaggctttcgttggaaacgggatttcttcatattctgttagaaagaagaattctcagtaacttccttgtgttgtgtgtattcaactgacagagttgaactttcatttagagagagcagatttgaaacactgtttttgtggaatttgcaagtggagatttcaagcgctttggggccaaaggcagaaaaggaaatatctccgtataaaaactagacagaatcattctcagaaactgctctgtgatgtgtgcgttcaactctcagagtttaacatttcttttcattcagcagtttggaaacactctgtttgtaaagtctgcacgtggataatttgaccacttagaggccttcgttggaaacgggtttttttcatgtaaggctagacagaagaattctcagaaacttccttgtgttgtgtgtattcaactcacagagttgaacgatcgtttacacggagcagacttgagacactctttttgtggaatttgcaagtggagatttcagccgctttgagttcaatggtagaataggaaatatcttcatataaaaactagacagaatgattctcagaaactcctttctgatgtgtgcgttcaactcacagagtttaaactttcttttcatagagcagttaggaaacactctgtttgtaaagtctgcaagtggatattcagacctctttgaggccttcgttggaaacgggatttcttcatattatgctagacagaagaattctcagaaaattccttgtgttgtgtgtattcaactcacagagttgaacgatcctttacagagagcagacttgaaacactctttttgtggaatttgcaagtggagatttcagccgctttgaggtcaatggtagaataggaaatatcttcctatagaaacttgacagaatgattctcagaaactactttgtgatgtgtacgttcaactcacagagtttaacctttgttttcatagagcagttaggaaacactctgtttgtaaagtctgcaagtggatattcagacctctttgaggccttcgttggaaacgggtttttttcatataaggctagacagacgaattctcagtaacttccttgtgttgtgtgtattcaactcacagagttgaacgatcctttacacagagcagacttgaaacactctttttgtggaatttgcaagtggagatttcagccgctttgaggtcaatggtagaataggaaatatcttcctatagaaactagacagaatgattctcagaaactcctttgtgctgtgtgcgttcaactcacagagtttaacctttcttttcatagagcagttaggaaactctctgtttgtaaagtctgcaagtggatattcagacatctttgaggctttcgttggaaacgggatttcttcatattctgctagacagaagaattctcagtaactttccttgtgttgtgtgtattcaactcacagagttgaacgatcctttacacagagcggacaggaaacactctttttctggaatttgcaagcggagatttcagctgcgttgaggtcaatggtagaaaaggaaatatcttcgtataaaaactagacagaatgattctcagaaactcctttgtgatgtgtgcgttcaactcacagagtttaacctttcttttcatagagcagttagggaacactctgtttgtaaagtctgcaagtggatattcagaccgctttgaggccttcgttggaaaggggatttcttcatattctgctagacagaagaattctcagtaacttcattgtgttgtgtgtattcaactcacagatttcaacgatcctttacacagagcagacttgaaacactctttttgtggaatttgcaagtggagatttcagcctctttgaggtcaatggtagaataggaaatatcttcctatagaaaccagacagaatgattctcataaactcctttgtgatgtgtgcgttcaactcacagagtttaacctttcttttcatagagcagttaggaaacactctgtttgtaaagtctgcaagtggatattcagacctgcttgaggccttctttggaaaagggatttctgcatattatgctagacagaaggaattctcagtaacttccttgtgttgtgtgtattcaactgacagagttgaactttcatttagagagagcagatttgaaacactgtttttgtggaagttgcaagtggagatttcaagcgctttggggccaaaggcagaaaaggaaatatcttcgtataaaaactagacagaatgattctcacaaactcctttgtgatgtgtgtgttcaactcacagagtttaacctttcttttcatagagcagttagtaaacactctgtttataaagtctgcaagtggatattcagacctccttgaggccttcgttggaaacgggatttcttcatattatgctagacagaagaattcccagtaacttccttgtgttgtgtgcattcaactcacagagttgaacgttcccttagacagagcagatttgaaacactctatttgtgcaatttgcaagtgtagttttcaagctctttaaggtcaacggcagaaaaggaaatatcttcgtttcaaaactagacagaatgattctcagaaactcctttgtgatgtgtgcgttcaactcacagagtttaacctttcttttcatagagcagttaggaaacactctgtttgtaaagtctgcaaatggatattccgacctccttgagggcttcgttggaaacgggatttcttcatattctgctatacagaagaattctcagaaacttcattgtgttgtgtgttttcaactcacagagttcaacgatcctttacacagagtagatttgaaacactctttttgtggaattggcagggtggagatttcagccgctttgcggtcaatggtagaaaaggaaatatcttcgtataaaaactagacagaatgattctcagaaactcctttgtgatgtgtgcgttcaactcacagagtttaacctttcttttcatagagcagttgggaaacactctgtttgtaaagtctgcaagtggatattcagacatccttgaggctttcgttggaaatgggatttcttcatattctgctagaaagaataattctcagtaacttccttttgttgtgtgtattcaactcacagagctgaacgatcctttacagagagcagactttaaacactctttttgtggaatttgcaagtggagatttcagccgctttgaggtcaatgttagaataggaaataacttcctatagaaactagacagaatgattctcagaaactcctttgtgatgtgtgcgttcaactcacagagtttaacttttcttttcatagagcagttaggaaacactgtgtttgtaaagtctgcaagtggatattcagacctctttgaggccttcgttggaaacgggatttcttcatattatgctagacagaagaattctcagtaaattccttgtgttgtgtgtattcaactcacagagttgaacgatcctttacacagagcagacttgaaacactctttttgtggaatttgcaagtggagatttcagccgctttgaggtcaatggtagaataggaaatatcttcctatagaaaatagacagaatgattctcagaaactcctttgtgatgtgtgtgttcaactcacagagtttaacctttcttttcatagagcagttaagaaacactctgtttgtaaagtctgcaagtggatattcagacctccttgaggccttcgttggaaacgggatttcttcatattctgctagacagaagaattcccagtaacttccttgtgttgtgtgtgttcaactcacagagttgaactttcatttacacagagcagatttgaaacactctttttgtggaatttgcaagtggggatttcaagcgctgtgaggccaaaggcagaaaaggaaatatcttcttataaaaactagacagaatcattctcagaaactgctgcgtgatgtgtgcgttcaactctcagagtttaacttttcttttcattcagcggtttggaaacactctgtttgtaaagtctgcacgtggaaattttgaccacttagaggccttcgttggaaacgggattttttcatgtaaggctagacagaagaattcccagtaacttccttgtgttgtgtgcattcaactcacagagttgaacgttcccttagacagagcagatttgaaacactctatttgtgcaatttgcaagtgtagttttcaagctctttaaggtcaacggcagaaaaggaaatatcttcgtttcaaaactagacagaatcattcccacaaactgcgttgtgatgtgttcgttcaactcacagagtttaacctttctgttcatagagcagttaggaaacactctgtttgtaaagtctgtaagtggatattctgacatcttgtggccttcgttggaaacgggatttgttcatattctgctagacagaagaagtctcagtaacttccttgtgttttgtgtattcaactcacagagttgaacgatcctttacacagagcagacttgaaacactctttttgtggaatttgcaactggagatttcagccgctttgaggtcaatggtagaataggaaatatcttcctatagaaactagacagaatgattctcagaaactcctttgtgatgtgtgcgttcaactcacagagtttaacctttcttttcatagagcagttaggaaacactctgtttgtaaagtctgcaagtggatatttagacatctttgtggatttcgttggaaacgggatttcttcatattctgctatacagaagaattctcagaaacttccttgtgttgtgtgtattcaactcacagagttcaacgatagtttacacagagcagacttgaaacactctttttgtgtaatttgcaagtggagatttcagccgcttcgaggtcaatggtagaaaaggaaatatcttcgtataaaaactagacagaatcattctcagaaactgctctgcgatgtgtgcgttcaactctcagagtttaacatttcttttcatttagcagtttggaaacactctgtttgcaaagtctgcacgtggataatttgaccacttagaggccttcgttggaaacgggtttttttcatgtaaggctagacagaagaattcccagtaacttccttgttttgtgtacattcaactcacagagttgaacgttcccttagacagagcagatttgaaacactctttttgtgcaattggcaaatggagatttcaagcgctttaaggtcaatggcagaaaaggaaatatcttcgtttcaaaactagacagaatcattcccacaaactgcgttgtgatgtgttcgttcaactcacagagtttaacctttctgttcatagagcagttaggaaacactctgtttgtaaagtctgtaagtggatattctgacatcttgtggccttcgttggaaacgggatttcttcctattctgctagacagaagaattctcagtaacttccctgtgttgtgtgtattcaactcacagagttgaacgatcctttacagagagcagacttgaaacactctttttgtggaatttgcaagtggagatttcagccgctttgaggtcaatggtagaataggaaatatcttcccatagaaactagacagaatgattcccacaaaatcctttgtgatgtgtgcgttcaactcacagagtttaacctttcttttcatagagcagttagtaaacactctgtttataaagtctgcaagtggatattcagacccctttgaggccttcgttggaaacgggatttcttcatattatgctagacagaagaattctcagtaacttccttctgttgtatgtattcaactgacagagttgaactttcatttagagagagcagatttgaaacactgtttttgtggaatttgcaagtggagatttcaagcgcttcggggccaaaggcagaaaaggaaatatcttcgtataaaaactagacagagaatcattctcagaaactgctctgcgatgtgtgcgttcaactctcagagtttaacttttcttttcattcagcagtttggaaacactctggttgtaaagtctgcacgtggataacttgaccacttagaggccttcgttggaaacgggtttttttcctgtaaggctagacagaagaattcccagtaacttccttgtgttgtgtgcattcaactcacagagttgaacgttcccttagacagagcagatttgaaacactctatttgtgcaatttgcaagtgtagatttcaagcgctttaaggtcaatggcagaaaaggaaatatcatcgtttcaaaactagacagaatcattgccacaaactgcgttgtgatgtgttcgttcaactcacagagtttaacctttctgttcatagagcagttaggaaacactctgtttgtaaagtctgtaagtggatattctgacatcttgtagccttctttggaaacgggatttcttcatattctgctagacagaagaattctcagtaacttccttgtgttgtgtgtattcaactcacagagttgaacgatcctttacacagagcagacttgaaacactctttgtgtggaatttgcaagtggagatttcagccgctttgaggtcaatggtagaataggaaatatcttcgtataaagactagacagaatgattctcagaaactcctttgtgatgtgtgcgttcaactcacagagtttaacttttcttttcatagagcagttaggaaacactctttttgcaaagtctgcaagtggatattcagacctctttgaggccttcgttggaaacgggatttcttcatattatgctagacagaagaattcccagtaacttccttgtgttgtgtgtgttcaactcacagagttgaactttcatttacacagagcagatttgaaacactctttttgtggaatttgcaagtggagatttccagcgctttgaggccaaaggcagaaaaggaaatatcttcgtttcaaaactagacagaatcattctcagaaactgctgcgtgatgtgtgcgttcaactctcagagtttaacttttcttttcattcagcggtttggaaacactctgtttgtaaagtatgcacgtggatattttgaccacttagaggccttcgttggaaacgggttttttgcatgtaaggctagacagaagaattcccagtaacttccttgtgttgtgtgtgttcaactcacagagttgaacgttcccttagacagagcagatttgaaacactctatttgtgcaattggcaagtggtgatttcagccgctttggggtcaatggtagaaaaggaaatatcttcgaataaaaactagacagaatcattcccacaaactgcgttgtgatgtgttcgttcaactcacagagtttaacctttgtgttcatagagcagttaggaaacactctgtttgtcaagtctgtaagtggatattctgacatcttgtggccttcgttggaaacgggatttcttcatattctgctagacagaagaattctcagtaacttccttgtgttgtgtgtattcaactcacagagttgaatgatcctttacacagagcagacttgaaacactctttttgtggaatttggaagtggagatttcagccgctttgagttcaatggtagaataggaaatatcttcctatagaaactagacagaaatgattctcagaaactcctttgtgatgtgtgcgttcaactcacagagtttaacctttgttttcatagagcagttaggaaacactctgtttgtaaagtctgcaagtggatattcagacctccttgaggccttcgttggaaacgggatttcttcatattatgctagacagaagaactcccagtaacttccttgtgttgtgtgtgttcaactcacagagttgaactttcatttacacagagcagatttgaaacactctttttgtggaatttgcaagtggagatttcaagcgcgttgaggccaaaggcagaaaaggaaatatcttcgtttaaaaactagacagaatgattctcagaaactcctttgtgatgtgtgcgttgaactcacagagtttaacctttcttttcatggagcagttaggaaacactctgtttgtaaagtctgcacgtggatacttggacttctttgaggccttcgttggaaacgggtttttttcatgtaaggttaaacagaagaattcccagtaacttccttgtgttgtgtgcattcaactcacagagttgaacgtaccttagacagagcagatttgaaacactctatttgtgcaatttgcaagtgtagatttcaagcgctttaaggtcaatggcagaaaaggaaatatcttcgtttcaaaactagacagaatgattctcagaaacttcattgtgacgtgtgctttcaactcacagagtttaacctttcttttcatagaggagttaggaaacactctgtttgtaaagtctgcaagtggatattcagacctctttgaggccttcgttggaaacgggatttcttcatactgtgctagacagaagaattctcagtaacttccttgtgttgtgtgtattcaactcacagagttgaacgatcctttacacagagcggactttaaacacactttttgtggaatttgcaagtggagatttcagccgcattgaggtcaatggtagaaaaggaaatatcttcgtataaaaactagacagaatgattctcagaaacttctttgtgatgtgtgcgttcaactcacagagtttaacctttcttttcatagagcagttaggaaacactccgtttgtaaagtctgcaagtggatattcagacctctttgaggccttcgttggaaacgggatttcttcatactatgctagacagaagaattcccagtaacttccttgtgttgtgtgtgttcaactcacagagttgaactttcatttacacagagcagatttgaaacactctttttgtggaatttgtaaatggagatttcaagcgctttgaggccaaaggcagaaaaggaaatatcttcgtataaaaactagacagaatcattctcagaaactgctctgtgatgtgtgcgttcaactctcagagtttaacttttcttttcattcagcagtttggaaacactctgtttgtaaagtctccacgtggatatttggacttgtttgaggccttcgttggaaaagtgtttttttcatgtaaggctagacagtagaattcccagtaacttccttgcgttgtgtacattcaactcacagagttgaacgttcccttagacagagcagatttgaaacactctttttgtgcaattggcaagtggagatttcaagcgctttaaggtcaatggcagaaaaggaaatatcttcgtttcaaaactagacagaatcattcccacaaactgcgttgtgatgtgttcgctcaactcacagagtttaacctttctgttcatagagcagttaggaaacactctgtttgtaaagtctgtaagtggatattctgacatcttgtggccttcgttggaaacgggatttcttcctattctgctagacagaagaattctcagtaacttccttgtgttgtgagtattcaactcacagagttgaacgatcctttacacagagcggacttgaaacactcgttttgtggaatttgcaagtggagatttcagccgctttgaggtcaatggtagaaaaggaaatatcttcgtataaaaactagacagaattattctcagaaactcctttgtgatgtgtgcgttcaactcacagagttcaacctttcttttcatagagcagttgggaaacactctgtttgtaaagtctgcaagtggatattcagacttctttgaggccttcgttggaagcgggatttcttcatattctgctagacagagtaattctcagtaacttccttgtgttgtgtgtattcaactgacagagttgaactttcatttagagagagcagatttgaaacactgtttttgtggaatttgcaagtggagatttcaagcgctttcgggccaaaggcagaaaaggaaatatcttcgtataaaaactagacagaatcattctcagaaactgctctgcgatgtgtgcgttcaactctcagagttcaacttttcttttcattcagcagtttggaaacactctgtttgtaaagtctgcacgtggataatttgaccacttagagaccttcgttggaaacgggtttttttcatgtaaggctagacagaagaattcccactaacttccttgtgttgtgtgcattcaactcacagagttgaacgttcccttagacagagcagatttgaaacagcctatttgtgcaatttgcaagtgtagatttcaagcgctttaaggtcaacggctgaaaaggaaatatcttcctttcaaaactagacagaatcattcccacaaactgcgttgtgatgtcttcgttcaactcacagagtttaacctttcttttcatagagcagttaggaaacagtctgtttgtaaattctgtaagtggatattctgacatcttgtggccttcgttggaaacgggatttcttcatattctgctagacagaagaattctcagtaacttccttgtgttgtgtgtattcaactcacagagttgaactatcctttacacagagcagacttgaaccaaactttttgtggaatttgcaagtggagatttcagccgctttgaggtcaatggtagaataggaattatcttcctatagaaactagacagaatgattctcagaaactcctttgtgatgtgtgcgttcaactcatagagtttatcctttcttttcatagagcagttaggaaacactctgtttgtaaagtctgcaagtggatattcagacatccttgaggctttcgttggaaacgggatttcttcatattctgctagaaagaagaattctcagcaacttccttgtgttgtgtgtattcaactcacagagttgaacgatcctttacacagagcagacttgaaacactctttttgtggaatttgcaagtggagatttcagccgctttgaggtcaatggtagaataggaaatatcttcctaaagaaactagacagaatgattctcagaaactcctttgtgatgtgtgcgttcaactcacagagtttaacctttcttttcatagagcagttaggaaacactctgtttgtaaagtctgcaagtggatattcagacctccttgaggccttcgttggaaacgggatttcttcatattctgctagaaaaaagaattctcagtaacttccttgtgttgtgtttattcaaatcacagagttgaatgatcctttacacagagcagacttgaaacactctttttgtggaatttgcaagtggagatttcagccgctttgtggtcaatggtagaaaaggaaatatcttcgtataaagactagacagaatgattctcagaaactcctttgtgatgtgtgcgttcaactcacagtgtttaacctttcttttcatagagcagttgggaaacactctgtttgtaaagtctgcaagtggatattcaaacttctttgaggccttcgttggaagcgggatttcttcatattctgctagacggaagaattctcagtaacttccttgtgttgtgtgtattcaactctcagagttgaacgatcctttacagagagcagacttgaaacactctttttgtggaatttgcaagtggagatttcagccgctttgaggtcaatggtagaataggaaatatcttcctatagaaactagacagaatgattctcagaaactcctttgtgatgtgtgcgttcaactcacagagtttaccctttcttttcatagagcagttgggaaacactctgtttgtaaagtctgcaagtggatattcagacctccttgaggctttcgttggaaacgggatttcttcatattctgctagaaagaataattctcagtaacttccttgtgttgtgtgtattcaactcacagagttgaacgatcctttacagagagcagacttgaaacactctttttgttgaatttgcaagtggagatttcagccgctttgaggtcaatggtagaaaaggaaactatcttcgtataaagactagacagaatgattctcagaaactcctttgtgatgtgtgcgttcaactcacagagtttaacctttcttttcatagagcagttgggaaacactctgtttgtaaagtctgcaagtggatattcagacattcttgaggctttcgttggaaacgggatttcttcatattctgctagaaagaagaattatcagtaacttccttgtgttgtgtgtattcaactcacagagttgaacgatcctttacacagagcagtcttgaaacactcttgttgtggaatttgcaagtggagatttcagccgctttgaggtcaatggtagaaaaggaaatatcttcgtataaaaactagacagaatgattctcagaaactcctttgtgatgtgtgcagttcaacacacagagtttaacctttcttttcatagagcagttagggaacactctgtttgtaaagtctgcaagtggatattcagacctctttgaggccgtcgttggaaacgggatttcttcatattatgctagacagaagaattctcagtaacttccttgtgttgtgcgtattcaactcacagagttgaacgatcctttacacagagcagacttgaaacactctttttgcggaatttgcaactggagatttcagccgctttgaggtcaatggtagaataggaaatatcttcctatagaaattagacagaatgattctcagaaactcgtttgtgatgtgtgcgttcaactcacagagtttaacctttcttttcatagagcagttaggaaacactctgtttgtaaagtctgcaagtggatattcagtcctctttgaggccttcgttggaaacggggttttttcatataaggctagacagaagaattctcagtaactttccttgtgttgtgtgtattcaactcacacagttgaacgatcctttacacagagcagacttgtaacactctttttgtggaatttgaaagtggagatttcagccgctttgaagtcaaaggtagaaaaggaaatatcttcctataaaaactagacagaatgattctcagaaactcctttgtgatgtgtgtgttcaacgcacagagtttaacctttcttttcatagagcagttagtaaacactctgtttataaagtctgcaagtggatattcagacccctttgaggccttcgttggaaacgggatttcttcatattatgctagacagaagaattctcagtaacttcctcgtgttgtgtgtattcaactcacagagttgaatgatcctttacacagagcagacttgaaacactctttttgtggaatttgcaaatggagatttcagccgctttgaggtcaatggttgaaaaggaaatatcttcaaataaaaactagacagaatgattctcagaaactcctttgtgatgtgtgcgttcaactcacagagtttaacctttcttttcatagagcagttaggaaacactctgcttgtaaagtctgcaagtggatattcagccctctttgaggccttcgttggaaacgggtttttttcatataaggctagacgagaagaattcccagtaacttcccttgtgttgtgtgtgttcaactcacagagttgaactttcatttacacagagcagatttgaaacactctttttgtggaatttgcaagtggagatttcaagcgctttgaggccaaaggcagaaaaggaaatatcttcgtataaaaacttgacagaatcattctcagaaactgctctgcgatgtgtgcgttcaactctcagagtttaacttttcttttcattcagcagtttggaaacactctgtttgtaacgtctacacgtgaataatttgaccacttagaggccttcgttggaaacgggtttctttcatgtaaggctagacagaagaattcccagtaacttccttgtgttgtgtgcattcaactcacagagttgaacgttccctagacggagcagatttgaaacactctatttgtgcaatttgcaagtgtagatttcaagcgctttaaggtcaatggcagaaaagggaatatcttcgtttcaaaactagacagaatgattctcagaaactcctttgtgatgtgtgcgttcaactcacagagtttaacctttctgttcatagagctgttaggaaacactctgtttgtaaagtctgcaagtggatattcagatctccttgaggccttcgttggaaacgggatttcttcatattctgctagacagaagaattctcagtaacttccttgtgttgtgtgtattcaactcacagagttgaatgatcctttacacagaacagtcttgaaacactctttttctggaatttgcaagtggagatttcagccgctttgaggtcaatggtagaataggaaatatcttcctatagaaactagacagaatgattctcagaaactcctttgtgatgtgtgcgttcaactcacagagtttaacctttcttttcatagagcagttaggaaacaatctgtttgtaaagtctgcaagtggatattcagacatctttgaggctttcgttggaaacgggatttcttcatattctgctagacagcagaattctcagtaacttccttgtgttgtgtgtattcaactcacagagttgaacgaacctttacacagagcagacttgaaacactctttttgtggaatttgcaaggggagatttcagccgctttgaggtcaatagtagaaaaggaaatatcttcatatagaaactagacataatgattctcagaaactcctttgtgatgtgtgcgttcaactcacagagtttaacctttcttttcatagagcagttaggaaacactctgtttgtaaagtctgcaagtggatattcagacctccttggggccttcgttggaaacgggatttcttcatattatgctagacagaagaattctcagtaacttccttgtgttgtgtgtattcaactcacagagttgaacgatcctttacacagagccgacttgaaacactctttttgtggaatttgcaagtggagatttcagccgctttgaggtcaatggtagaaaaggaaatatcttcgtataaagactagacagaatgattctcagaaactcctttgtgatgtgtgcgttcaactcacagagtttaacctttcttttcatagagcagttaggaaacactctgtttgtaaagtctgcaagtggatattcagacctccttgaggccttccatggaagcgggatttcttcatgttcagctagacagaagaattctcagtaacttccttgtgttgtgtgtattcaactcacagagttgaacgatcctttacacagagcagacttgaaacactctttgtggaatttgcaattggagatttcagccgcgttgaggtcaatggtagaaaaggaaatatcttcgtataaaaactagacagaatgattctcagaaactcctttgtgatgtgtgtgttcaactcacagagtttaacctttcttttcatagagcagttaggaaacactctgtttgtaaagtctgcaagtggatattcagacctcctagaggccttcgttggaaacgggatttcttcatattctgctagtcagaagaattctcagtaacttccttgtgttgtgtgtattcaactcacagagttgaatgatccttgacacagagcagacttgaaacactctttttgtggaatttgcaagtggagatttcagccgctttgaggtcaatggtagaaaaggaaatatcttcatataaaaattagacagaaggattctcagaaactcctttgtgatgtgtgcgttcaactcacagagtttaacctttcttttaatagagcagttaggaaacactctgtttgtaaagtctgcaagtggatattcagacctctttgaggccttcgttggaaacgggtttttttcatataaggctggacagaagaattcccagtaacttccttgtgttgtgtgcattcaactcacagagttgaacgttcccttagacagagcagatttgaaacactctatttgtgcaatttgcaagtgtagatttcaagcactataaggtcaatggcagaaaaggaaatatcttcgtttcaaaactagacagaatcattcccacaaactgcgttgtgatgtgttcgttcaactcacagagtttaaccattctattcatagagcagttaggaaacactctgtttgtaaagtctgtaagtggatattctgacatcttgtggccttcgttggaaacgggatttcttcatattctgctagacagaagaattctcagcaacttccttgtgttgtgtgtattcaactcacagagttgaacgatcctttacacagagcagaattgaaacactgtttttgtggaatttgcaagtggagatttctgccgctttgaggtcaatggcagaaaaggaaatatcttcctatagaaactagacagaatgattctcagaaactcctttgtgatgtgtgcgttcaactcacagagtttaacctttcttttcatagagcagttaggaaacactctgtttgtaaagtctgcaagtggatatttagacctctctgaggccttcgttggaaacgggatttcttcatattctgctagacagaagaattcccagtaacttccttgtgttgtgtgtgttcaactcacagagttgaaatttcatttaaacagagcagatttgaaacactctttttgtggaatttgcaagtggagatttcaagcgctttgaggccaaaggcagaaaaggaaatatcttcctataaaaactagacagaatcatgatcagaaactgctctgcgatgtgtgcgttcaactctcagagtttaacttttcttttcattcagcagtttggaaacactctgtttgtaaagtctgcacgtggataatttgaccacttagaggccttcgttggaaacaggtttttttcatgtaaggctagacagaagaattcccagtaacttccttgtgttgcgtacattcaactcacaaagttgaacgttcccttagacagagcagatttgaaacactctttttgtgcaattggcaagtggagatttcaagcgctttaaggtcaatggcagaaaaggaaatatcttcgtttcaaaactagacagaatcattcccacaaactgcgttgtgatgtgttcgttcaactcacagagtttaaactttcttttcatagagcagttaggaaacagtctgtttgtaaattctgtacgtggatattctgacatcttgtggccttcgttggaaacgggatttcttcatattctgctagacagaagaattctcagtaacttccttgtgttgtgtgtattcaactcacagagttgaacgatcgtttacacagagcagacttgaaacactctttttgtggaatttgcaagtggagatttcagccgctttgaggtcaatggtagaaaaggaattatcttcgtataaaaactagacagaatggttctcagaaactcctttgtgatgtgtgcgtttaactcacagagtttaacctttcttttcatagagcagttaggaaacactctgtttgtaaagtctacaagtggatattcagacctctttgaggccttcgttggaaacgggtttttttcatataaggctagacagaagaattctcagtaacttccttgtgttgtgtgtattcaactcacagagttgaacgatcctttacacagagcagacttgaaacactctttttgtggaatttgcaagtggagatttcagccgctttgaggtcaatggtagaaaagtaaatatcttcgtataaaaactagacagaatgattctcagaaactcctttgtgatgtgtgcgttcaactcacagagtttaaccattcttttcatagagcagttaggaaacactctgtttgtaaagtctgcaagtggatattcagacctccttgaggccttcgttggaaacgggatttcttcctattatgctagacagaagaattctcagtaacttccttgtgttgtgtgtattcaactcacagagttgaacgatcctttacacagagcagagttgaaacactctttttgtggaatttgcaagtggagatttcagccgctttgaggtcaatagcagaaaaggaaatatcttcgtagaaaaactagacagaatgattctcagaaactcctttgtgatgtgtgcgttcaactcaaagagtttaacctttcttttcgtagagcagttaggaaacactctctttgtaaagtctgcaagtggatattcagacctctttgaggcctacgttggaaacgggatttcttcatattatgatagacagaagaattctcagaaacttccttgtgttgtgtgcattcaactcacagagttgaacgatcctttacacagagcagattagaaacattctttttgtggaatttgcaagcggagatttcagccgctttgaggtccatggtagaaaaggaaatatcttcgtataaaaactagacagaatgattctcagaaacttcattgtgatgtgtgcgttcaactcacagagtttaacctttcttttcatagagcagttaggaaacactctgtttgtaaactctgcaagtggatattcagacctctttgaggccttctttggaaacgggatttcttcatactgtgctagacagaagaattctcagtaacttccttgtgttgtgtgtattcacctcacagagttgaacgatcctttacacagagcagacttgaaacactctttttgtggaatttgcaagtggagatttcagccgctttgaggtcaatggtagaataggaaatatcttcctatagaaactagacagaacgattctcagaaactcctttgtgatgtgtgcgttcaactcacagagtttaacctttcttttcatagagcagttaggaaacactctgtttgtaaaggctgcaagtggatattcagacctctttgaggccttcgttggaaacgggatttcttcctattctgctagacagaagaattctcagtaacttccttgtgttgtgtgtattgaactcacagagttgaacgatcctttacacagagcagacttgaaacactctttttgtggaatttgcaagtggagatttcagccgctttgaggtcaatagtagaaaaggaaatatcttcgtataaagactagacagaatgattctgagaaactcctttgtgatgtgtgcgttcaactcacacactttaacctttcttttcatagagcaattaggaaacactctgtttgtaaagtctgcaagtggatattcagacctctttgaggccttcgttggaagcgggatttcttcatattctgctagacagaagaattcccagtaacttccttgtgttgtgtgtgttcaactcacagagttgaactttcatttacacagagcagatttgaaacactctttttgtggaatttgcaaatggagatttcaagcgctttgaggaaaaaggcagaaaaggaaatgtcttcgtttcaaaactagacagaatgattctcagaaactcctttgtgatgtgtgcgttcaactcacagagtttaacttttcttttcatagagcagttaggaaacactctgtttgtaaagtctgcaagtggatattcagacctccttgaggccttctttggaaacgggatttcttcatattctgctagacagaagaattctcactaacttccttgtgttgtgtgtattcaactcacagagttgaacgatcctttacaaagagcagacttgaaacactctttttgtagaatttgcaagtgtagatttcagccgctttgaggtcaatggtagaaaaggaaatatcttcgtataaagactagacagaatgattctcagaaactcctttgtgatgtgtgcgttcaactcacagagtttaacttttcttttcatagagcagttaggaaacactctgtttgtaaagtctgcaagtggatattcagacctccttgaggccttcgttggaaacaggatttcttcatattctgctagacggaagaattctcagtaaattccttgtgttgtgtgtattcaactcacagagttgaacgatcctttacaaagagcagacttgaaacactctttttgtggaatttgcaagtggagatttcagccgctttgaggtcagtagtagaaaaggaaatatcttcgtagaaaaactagacagaaatgattctcagaaactcctttgtgatgtgtgtgttcaactcacagagtttaacctttcttttcatagagcagttaggaaacactctgtttctaaagtctgcaagtggatattcagacctctttgaggccttcgttggaaacgggtttttttcatataaggctagacagaagaattccctgtaacttccttgtgttgtgtgtattcaactgacagagttgaactttcatttagacagagcagatttgaaacactctttttgtggaatttacaagtggagatttcaagcgctttgaggccaaaggcagaaaaggaaatatcttcgtataaaaactagacagaatcattctcagaaactcctttgtgatgtgtgcgttcaactctcagagtttaacttttcttttcattcagcggtttggaaacactctgtttgtaaagtctgcacgtggaaattttgaccacttagaggccttcgttggaaacgggtttttttcatgtaaggctagacagaagaattcccagtaacttccttgtgttgtgtgcattcaactcacagagttgaacgttcccttagacagagcagatttgaaacactctatttgtgcaatttccaagtgtagatttcaagcgctttaaggtcaatggcagaaaaggaaatatcttcgtttcaaaactagacagaatcattcccacaaactgcgttgtgatgtgttcgttcatctcacagagtttaacctttcttttcatagagcagttaggaaacagtctgtttgtaaattctgtaagtggatattctgacatcttgtggccttcgttggaaacgggatttcttcatattctgctagacagaagaattctcagtaacttccttgtgttgtgtgtattcaactcacagagttgaacgatcctttacacagagcagacttgaaacactctttttgtggaatttgcaagtggagatttcagccgctttgaggtcaatagtagaaaaggaaatattttcgtagaaaaactagacagaatgattctcagaaactcctttgtgatgtgtgcgttccactcacagagtttaacctttcttttcatagagcagttaggaaacactctgtttgtaaagtctgcacctggatatttggacttctttgaggccttcgttggaaacgggtttttttcatgaaaggctagacagaagaattcccagtaacttccttgtgttgtgtgtgttcaactcacagagttgaactttcatttacacagagcagatttgaaacactctttttgtggaatttgcaaatggagatttcaagcgctttgaggaaaaaggcagaaaagggaatatcttcgtataaaaactagacagaatcattctcagaaagtgctctgcgatgtgtgcgttcaactctcagagtttaacttttcttttcattcagcagtttggaaacactctgtttgtaaagtctgcacgtggataatttgaccacttagaggccttcgttggaaacgggtttttttcatgtaaggctagacagaagaattcccagtaacttccttgcgttgtgtacattcaactcacagagttgaacgttcccttagacagagcagatttgaaacactctttttgtgcaattggcaagtggagatttcaagcgctttaaggtcaatggcagaaaaggaaatatcttcgtttcaaaactagacagaatcattcccacaaactgcgttgtgatgtgttcgttcaactcacagagtttaacctttcttttcatagagtagttaggaaacagtctgtttgtaaattctgtacgtggatattctgacatcttgtggccttcgttggaaacgggatttcttcatgttctgctagacagaagaattctgagaatcttccttgtgttgtgtgtattcaactcacagagttgaacgatggtttacacagagcagatttgaaacactctttttgtggaatttgcaagtggagatttcagccgctttgaggtcaatggtagaaaaggaaatatcttcgtataaaaactagacagaatgattctcataaactcctttgtgatgtgtgcgttcaaatcacagagtttaacttttcttttcatagagcagttaggaaacactctgtttgtaaagtctgcaagtggatattcagacctctttgaggccttcgttggaaacgggatttctacatattatgctagacagaagaattcccagtaacttccttgtgttgtgtgtgttcaactcacagagttgaactttcatttacacagagcagatttgaaacactctttttgtggaatttgcaagtggagatttcaagcgctttgaggccaaaggcagaaaaggaaatatcttcgtataaaaactagagagaatcattctcagaaactgctctgtgatgtgtgcgttcaactctccgagtttaacttttcttttcattcagcagtttggaaacactctgtttgtaaagtctgcacgtggataatttgaccacttagaggccttgtttggaaacggattttttttcatgtaaggctagacagaagaattcccagtaacttccttgtgttgtgtacattcaactcacagagttgaacgttcccttagacagagcagatttgaaacactctttttgtgcaattggcaagtggtgatttcagccgctttgaggtcaatggtagaaaaggaaatatcttcgtataaaaactagacagaatcattcccacaaactgcgttgtgatgcgttcgttcaactcacagagtttaacctttctgttcatagagcagttaggaaacactctgtttgtaaagtctgtaagtggatattctgacatcttgtggccttcgttggaaacgggatttcttcatattctgctagacagaagaattctcagaatcttccttcagttgtgtgtattcaacacacagagttgaacgatggtttacacagagcagatctgaaacactttttgtggaatttggaagtggagatttcagctgctttgaggtcaatggcagaaaaggaaatatcttcgtataaaaactagacagaatgattctcagaaactcctttgtgatgtgtgcgttcaactcacagagtttaacctttcttttcatagagcagttaggaaacactctgtttgtacagtctgcaagtggatattctgacctccttgaggccttcgttggaaaagggatttcttcatattctgctagacagaagaattcccagtaacttccttgtgttgtgtgtgttcaactcacagagttgaactttcatttacacagagcagatttgaaacactctttttgtggaatttgcaagtggagatttcaagcgctttgaggccaaaggcagaaaaggaaatatcttcgtataaaaactagacacaatcattctcagaaactgctctgtgatgtgtgcgttcaactctcagagtttaacttttcttttcattcagcagtttggaaacactctgtttgtaaagtctgcacgtggataatttgaccacttagaggccttcgttggaaacgggtttttttcatgtaaggctagacagaagaattcccagtaacttccttgtgttgtgtacattcaactcacagagttgaacgttcccgtagacagagcagatttgaaacactctttttgtgcaattggcaagtggagatttcaagcgctttaaggtcaatggcagaaaaggaaatatcttcgtttcaaaactagacagaatcattcccacaaactgcgttgtgatgtgttcgttcaactcacagagtttaacctttctgttcatagagcagttaggaaacactctgtttgtaaggtctgcaagtggatattcagacctcctagaggccttcgttggaaacgggatttcttcatattctgctagacagaagaattcccagtaacttccttgtgttgtgtgtgttcaactcacagagttgaactttcatttacacagagcagatttgaaacactctttttgtggaatttgcaagtggagatttcagctgctttgaggtccatggtagaaaaggaaatatcttcgtataaaaactagacagaatgattctgagaaactcctttctgatgtgtgcgttcaactcacagagtttaacctttcttttcatagagcagttaggaaacactctgttggtaaagtctgcaagtggatattcagacctccttgaggccttcgttggaaacgggatttcttcatattatgctagacagaagaattctcagtaacttccttgtgttgtgtgtattcaactgacagagttgaactttcatttagagagagcagatttgaaacactgtttttgtggaatttgcaagtggagatttcaagcgctttggggccaaaggcagaaaaggaaatatcttcatataaaaactagacagaatcattctcagaaactgctctgtgatgtgtgcgttcaactctcagagtttaacttttctcttcattcagcagtttggaaacactctgtttgtaaagtctgcacgtggataatttgaccacttagaggccttcgttggaaacgggtttttttcatgtaaggctagacagaagaattcccagtaacttccttgtgttgtgtacattcaactcacagagttgaacgttcccttagacagagcagatttgaaacactctttttgtgcaattggcaagtggtgatttcagccgctttgaggtcaatggtagaaaaggaaatatcttcgtataaaaactagacagaatgattctcagaaacttcactgtgacgtgtgcgttcaactcacagagtttaacctttcttttcatagagcagttaggaaacactctgtttgtaaactctgcaagtggatattcagacctctttgaggccttcgttggaaacgggatttcttcatactgtgctagacagaagaattctcagtaacttccttgtgttgtgtgtattcaactcactgagttgaacgatcctttacacagaacatactagaaacactcttcttgtggaatttgcaagtggagatttcagccgctttgaggtcaatggtagaataggaaatatcttcgtataaaaattagatagaatgattctcagaaactcctttgtgatgtgtgtgttcaactcacacagtttaacctttcttttcatagagcagttagtaaacactctgtttataaagtctgcaagtggatattcagacccctttgaggccttcgttggaaacggggtttcttcatattctgctagacagaagaattcccagtaacttccttgtgttgtgtgtgttcaactcacagagttgaactttcatttagacagagcagatttgaaacactctttttgtggaatttgcaaatggagatttcaagcgctttgaggccaaaggcagaaaaggaaatatcttcgtataaaaactagacagaatcattctcagaaactgctctgcgatgtgtgcgttcaactctcagagtttaactttgcttttcattcagcagtttggaaacactctgtttgtaaagtctgcacgtggataatttgaccacttagaggccttcgttggaaacgggtttttttcatgtaaggctagacagaagaattcccagtaacttctatgtgttgtgtgcattcaactcacagagatgaatgttcccttagacagagcagatttgaaacactctatttgtgcaatttgcaagtgtagatttcaagcgctttaaggtcaatggcagaaaaggaaatatcttcgtttcaaaactagacagaataattcccacaaactgcgttgtgatgtgttcgttcaactcacagagtttaacctttcttttcatagagcagttaggaaacactctgttggtaaattctgtaagtggatattctgacatcttgtggccttcgttggaaacgggatttcttcatattctgctagacagaagaattctcagtaacttccttgtgttgtgtgtattcaactcacagagttgaacgatcctttacagagagcagacttgaaacagtctttttgtggaatttgcaaatggagatttcagccgctttgaggtcaatggtagaaaaggaaatatcttcgtataaagactagacagaatgattctcagaaactcctttgtgatgtgtgcagttcaactcacagagtttaacctttcttttcatagagcagttaggaaacactctgtttgtaaagtctccaagtggatattcagacctctttgaggccttcgttggaaacgggtttttttcatataaggctagacagaagaattctcagtaacttccttgtcttgtgtgtattcaactcacagagttgaacgatactttacacagagcagacttgaaacccaccttttgtggaatttgcaagtggagatttcagccgctttgaggtcaatggtagaatacgaaatatcttcctatagaaactagacagaatgattctcagaaactcctttgtgatgtgtgcgttcaactcacagagtttaacctttcttttcatagagcagttaggaaacactctgtttgtaaagtctgcaagtggatattcagagctccttgaggccttcgttggaaatgggatttcttcatattatgctagacagaagaattctcagtaacttccttgtgttgtgtgtattcaactgacagagttgaactttcatttagagagagcagatttgaaacactgtttttgtggaatttgcaagtggagatttcaagcgctttggggccaaaggcagaaaaggaaatatcttcgtataaatactagacagaatcattctcagaaactgctgcgtgatgtgtgcgttcaactctcagagtttaacttttcttttcattcagcggttttggaaacactctgtttgtaaagtctgcacgtggaaattttgaccacttagaggccttcgttggaaacgggtttttttcatgtaaggctagacagaagaattcccagtaacttccttgtgttgtgtacattcaactcacagagttgaacgttcccttagacagagcagatttgaaacactttttttgtgcaattggcaagtggagatttcaagcgctttaaggtcaatggcagaaaaggaaatatcttcgtttcaaaactagacagaatcattcccacaaactgcgttgtgatgtgttcgttcaactcacagagtttaacctttccgttcatagaccagttaggaaacactctgtttgtaaagtctgtaagtggatattctgacatcttgtggccttcgttggaaacgggatttcttcatattctgctagacagaagaattctcagaaacttccttgtgttgtgtgttttcaactcacagagttcaacgatcctttacacagaggagacttgaaacactctttttgtggaatttgcaagtggagatttcagccgctttgaggtcaatggtagaataggaaatatcttcctatagaaactagacagaatgattctcagaaacttctttgtgatgtgtgtgttcaactcacagagtttaacctttcttttcatagagcagttaggaaacactctgtttgtaaactctgcaagtggatactcagacctctttgaggccttcgttggaaacgggatttcttcatactatgctagacagaagaattctcagtaacttcccttgtgttgtgtgtattcaactgacagagttgaactttcatttagagagagcagatttgaaacactgtttttgtggaatttgcaagtggagatttcaagcgctttggggccaaaggcacaaaaggaaatatcttcgtataaaaactagacagaatcattttcagaaactgcactgcgatgtgtgcgttcaactctcagagtttaacttttcttttcattcagcagtttggaaacactctgtttgtaaagtctgcacgtggataatttgaccacttagaggccttcgttggaaacgggtttttttcatgtaaggctagacagaagaattctcagtaacttccttgtgttgtgtgtattcaactcacagagttgaacgatcctttacacagagcagacttgaaagactctttttgtggaatttgcaagtggagatttcagccgctttgaggtcaatagtagaaaaggaaatatcttcgtagaaaaactagacagaatgattctcagaaactcctttgtgatgtgtgtgttcaactcacagagtttaacctttcttttcatagagcagttaggaaacactctgtttgtaaagtctgcaagtggataatcagacctctttgaggccttcgttggaaacgggatttcttcatattatgctagacagaagaattcccagtaacttccttgtgttgtgtgtgttcaactcacagagttgaactttcatttacacagagcagattggaaacactctttttgtggaatttgcaagtggagatttcaagcggtttgaggccaaaggcagaaaaggaaatatcttcgtataaaaactagacagaatcattctcagaaactgctctgcgatgtgtgcgttcaactctcagagtttaacttttcttttcattcagcagtttggaaacactctgtttgtaaagtctgcacgtggatattttgaccacttagaggccttcgttggaaacgggtttctttcctgtaaggctagacagaagaattcccagtaacttccttgtgttgtgtgcattcaactcacagagttgaacgttcccttagacagagcagatttgaaacactctatttgtgcaatttgcaagtgtagatttcaagcgcattaaggtcaatggcagaaaaggaaatatcttcgtttcaaaattagacagaatcattcccacaaactgcgttgtgatgtgttcgttcatctcacagagtttaacctttcttttcatagagcagttaggaaacagtctgtttgtaaattctgtaagtggatattctgagcatcttgtgcccttcattggaaacgggatttcttcatgttctgctagacagaagaattctcagtaacttccttgtgttgtgtgtattcaaatcacagagttcaacgatcctttacacagagcagacttgaaacactctttttgtgaaatttgcaagtggagatttcagccgctttgagttcaatggtagaataggaaatatcttcctatagaaactagacagaatgattctcagaaactcctttgtgatgtgtgcgttcaactcacagagtttaccctttcttttcatagagcagttaggaaacactctgtttgtaaagtctgcaattggatattcagacatccttgaggctttcgttggaaacagggatttcttcatattctgctagaaagaagaattctcagtaacttccttgtgttgtgtgtattcaactgacagagttgaacgatcctttacacagagcagacttgaaacactctttttgtggaatttgcaaggggagatttcaagcgctttggggccaaaggcagaaaaggacatatcttcgtataaaaactagacagaatcattctcagaaactgctctgcgatgtgtgcattcaactctcagagtttaatttttcttttcattcagcagtttggaaacattctctttgtaaagtctgcacgtggatattttgaccacttagaggccttcgttggaaacgggttttattcttgtaaggctagacagaagaattcccagtaacttccttgtgttgtgtacattcaacacacagatttgaacgttcccttagacagagctgatttgaaacactctttttgtgcaattggcaagtggagatttcaagcgctttaaggtcaatggcagaaaagtaaatatcttcgtttcaaaactagacagaatcattcccacaaactgcgttgtgatgtgttcgttcatctcacagagtttaacctttcttttcatagagcagttaggaaacactgtgtttgtaaattctgtaagtggatattctgacatcttgtggccttcgttggaaacgggatttcttcatattctgctagacagaagaattctcagtaacttccttgtgttgtgtgtattcaactcacagagttgaacgatcctttacacagagcagacttgaaacactctttttgtggaatttgcaagtggagatttcagccactttgatgtcaatggtagaaaaggaaatatcttcgtataaagactagacagagtgattctcagaaactcctttgtgatatctgcgttcaactcacagagttcaacctttcttttcatagagcagttaggaaacactctgtttgtaaagtctgcaattggatattgagacctccttgaggccttcgttggaaacgggatttcttcatattctgctatacagaagaattctcagaaacttccttgtgttgtgtgtattcaactcacagagttgaacgatcctttacacagagcagacttgaaacactctttttgtggaattggcaagtggagatttcagctgctttgaggtcaatggtagaaaaggaaatatcttcgtataaaaactagacagaatgattctcagaaactcctttgtgatgtgtgcgttcaactcacagagcttaaccttttttttcatagagcagttgggaaacactctgtttgtaaagtctgcaagtggatattcagacctccttgaggccttcgttggaaacgggatttcttcatattatgctagacagaagaattctcaggaacttccttgtgttgtgtgtattcaactcacagagttgaacgatcctttacacagagcagacttgaaacactctttttgtggaatttgcaagtggagatttcagccgctttgagttcaatggtagaataggaaatatcttcctatagaaagtacacagaatgattctcagaaactcctttgtgatgtgtgcgttcacctcacagagttcaacctttcttttcatagagcagttgggaaacactctgtttgtaaagtctgcaagtggatattcagacttctttgaggccttcgttggaagcgggatttcttcatattctgctagacagaagaattctcagtaactaccttgtgttgtgtgtattcaactgacagagttgaactttcatttagagagagcagatttgaaacactgtttttgtggaatttgcaagtggagatttcaagcgctttggggccaaaggcagaaaaggaaatatcttcgtataaaaactagacagaatcattctcagaaactgctgcgtgatgtgtgcgttcaactctcagagtttaacttttcttttcattcagcggtttggaaacactctgtttgtaaagtctgcacgtggaaattttgaccacttagaggccttcgttggaaacgggttttgttcatgtaaggctagacagaagaattcccagtaacttccttgtgttgtgtgcattcaactcacagagttgaacgttcccttagacagagcagatttgaaacactctatttgtgcaatttgcaagtgtagttttcaagctcttttaggtcaacggcagaaaaggaaatatcttggtttcaaaactagacagaaatcattcccacaaactgcgttgtaatgtgttcgttcaactcacagagtttaacctttctgttcatagagcagttaggaaacactctgtttgtaaagtctgtaagtggatattctgacatcttgtggccttcgttggaaacgggatttcttcatattctgctagacagaagaattctcagtaacttccttgtgttgtgtgtattcaactcacagacttgaacgatcctttacacagagcagacttgaaacactctttttgtggaatttgcaagtggagatttcagccgctttgaggtcaatggtagaaaaggaaatatcttcgtataaaaactagacagaatgattctcagaaacttctttgtgatgtgtgcgttcaactcacagagtttaacctttcttttcatagagcagttaggaaaccctctgtttgtaaactctgcaagtggatattcagacctctttgaggccttcgttggaaacgggatttcttcatactatgctagacagaagaattctcagtaacttccttgtgttgtgtgtattcaactgacacagttgaactttcatttagacagagcagatttgaaacactctttttgtggaatttgcaattggagatttcaagcgctttgaggccaaaggcagaaaaggaaatatcttcgtataaaaactagacagaatcattctcagaaactgctgcgtgatgtgtgtgttcaactctcagagtttaactttccttttcattcagcggtttggaaacactctgtttgtaaagtctgcacgtggatattttgaccacttagaagccttcgttggaaacgggtttttttgtatgtaaggctagacagaagaattcccagtaacttccttgtgttgtgtgcattcaactcacagagttgaacgttcccttagacagagcagatttgaaacactctatttgtccaatttgcaagtgtagatttcaagcgctttaaggtcaacggcagaaaaggaaatatcttcgtttcaaaactagacagaatcattcccacaaactgcgttgtgatgtgtacgttcaactcacagagtttaacctttctgttcatagagcagttaggaaacattctgtttgtaaagtctgtaagtggatattctgacatcttgtggccttcgttggaaacgggatttcttcatattctgctagacagaagaattctcagtaacttccttctgttgtgtgtattcaactcacagagttgaacgatcctttacacagagcagatttgaaacactctttttgtggaatttgcaagtggagatttcagccgctttgaagtcaaatgtagaaaaggaaatatcttcctataaaaactagacagaatgattctcagaaactcctttttgatgtgtgcgttcaactcacagagtttaacctttcttttcatagagcagttaggaaacactctgtttgtaaagtctgcaagtggatattcagacctctttgaggccttcgttggaaacgggtttttttcatataaggctagacagaagaattcccagtaacttccttgtgttgtgtgtgttcaactcacagagttgaactttcatttacacagagcagatttgaaacactctttttgtggaatttgcaagtggagatttcaagcgctttggggccaatggcagaaaaggaaatatcttcgtataaaaactagacagaaatcattctcagaaactgctctgcgatgtgtgcgttcaactctcagagtttaacttttcttttcattcagcagtttggaaacactctgtttgtaaagtctgcacgtggatattttgaccacttagaggccttctttggaaacgggtttttttcatgtaaggctagacagaagaattcccagtaacttccttgtgttgtgtatattcaactcacagagttgaacgttcccttagacagagcagatttgaaacactctttttgtgcaattggcaagtggagatttcaagcgctttaaggtcaatggcagaaaaggaaatatcttcgtttcaaaactagacagaatgattctcagaaactcctttgtgatgtgtgcgttcaactcacagagtttaacctttcttttcatagagcagttaggaaacactctgtttgtaaagtctgcaagtagatattcagacctccttgaggccttcgttggaaacgtgatttcttcatattatgctagacagaagaattctcagtaacttccttgtgttgcgtgtattcaactcacagatttgaacgatcctttacaaagagcagacttgaaacactctttttgtggaatttgcaagtggagatttcagccgctttgaggtcaatggtagaataggaaatatcttcctatagaaactagacagaatgattctcagaaactcctttgtgatgtgtgcgttcaactcacagagtttaacctttcttttcatagagcagttaggaaacactctgtttgtaaagtctgcacgtggatatttggacttccttgaggccttcgttggaaacggtttttttttcatgtaaggctagacagaagaattctcagtaacttcccttgtgttgtgtgtattcaactgacagagttgaactttcatttggagagagcagatttgaaacactgtttttgtggaatttgcaagtggagatttcaagcgctttggggccaaaggcagaaaaggaaatatcttcgtataaaaactagacagaatcattctcagaaactggctctgcgatgtgtgcgttcaactctcagagtttaacttttcttttcattcagcagtttggaaacactctgtttgtaaagtctgcacgtggatattttgaccacttagaggccttcgttggaaacgggtttctttcctgtaaggctagacagaagaattcccagtaacttcccttgtgttgtgtacattcaactcacagagttgaacgttcccttagacagagcagatttgaaacactctttttgtgcaattggcaagtggagatttcaagcgcgttgaggtcaatggcagaaaaggaaatatcttcgtttcaaaactagacagaatcattcccacaaactgcgttgtgatgtgttcgttcaactcacagagtttaacctttcttttcatagagcagttaggaaacagtctgtttgaaaattctgtaagtggatattctcacatcttgtggccttcgttggaaacgggatttcttcatattctgctagacagaagaattctcagtaacttccttgtgttgtgtttattcaactcacagagttgaatgatcctttacacagagcagacttgaaacactctttttgtggaatttgcaagtggagatttcagccgctttgaggtcaatagtagaaaaggaaatatcttcgtagaaaaactagacagaatgattctcagaaactcttttgtgatgtgtgcgttcaactcacagagtttaacatttctgttcatagagccgttaggaaacactctgtttgtaaagtctgcaagtggatattcacacctccttgagaccttcgttggaaacgggatttcttcatattctgctagacagaagaattttcagtaacttccttgtgttgtgtgtattcaactgacagagttgaactttcatttagacagagcagatttgaaacactctttttgtggaatttgcaagtggagatttcaagcgctttgaggccaaaggcagaaaaggaaatatgttcgtataaaaactagacagaatcattctcagaaactgctctgcgatgtgtgtgttcaactctcagagtttaacttttcttttccttcagcagtttggaaacactctgtttgtgaagtctgcacgtggatattttcaccacttagaggccttcgttggaaacgggtttttttcctgtaaggctagacagaagaattcccagtaacttccttgtgttgtgtacattcaactcacagagttgaacgttcccttagacagagcagatttgaaacactctttttgagcaattggcaaatggagatttcaagcgctttaaggtcaatggcagaaaaggaaatatcttcgtttcaaaactagacagaatgattctcataaactcctttgtgatgtgtgcgttcaactcacaaagtttaacttttcttttcatagggcagttaggaaacactctgtttgtaaagtctgcaagtggatattcagacctctttgaggccttcgttggaaacgggatttcttcatattatgctagacagaagaattctcagtaacttccttgtgttgtgtgtattcaactcacagagttgaacgatgctttacacagagcagacttgaaacattctttttgtggaatttgcaactggagatttcagccgctttgaggtcaatggtagaataggaaatatcttcctatagaaactagacagaatgattttgagaaactcctttgtgatgtgtgcgttcaactcacagagtttaacctttcttttcatagagcagttaggaaacactctgtttgtaaagtctgcaagtggatattcagacatccttgaggcttttgttggaaacgggatttcttcatattctgctagaaagaagaattctcagaaacttccttctgttgtgtgttttcaactcacagagttgaacgaacctttacacagagtagacttgaaacactctttttgtggaattggcaagtggagatttcagccgctttgaggtcaatggtagaaaaggaaatatcttcgtataaaaactagacagaataattctcagaaactcctttgtgatgtgtgcgttcaactcacggagtttaacctttcttttcatagagcagttaggaaacactctgtttgtaaagtctgcaagtggatattcagacctctttgaggccttcgttggaaacgggatttcttcatattatgctagacacaagaattcccagtaacttccttgtgttgtgtgtgttcaactcacagagttgaactttcatttacccagagcagatttgaaacactctttttgtggaatttgcaagtggagatttcaagagctttgaggccaaaggcagaaaaggaaatatcttcgtataaaaactagacagaatcattctcagaaactgctctgcgatgtgtgcgttcaactctcagagtttaacttttcttttcattcagcagtttggaaacactctgtttgtaatgtctgcacgtggataatttgaccacttagaggcattcgttggaaacgggtttttttcatgtaaggctagacagaagaattcccagtaacttccttgtgttgtgtgcattcaactcacagagttgaacgttcccttagacagagcagatttgaaacactctatttgtgcagtttgcaagtgtagatttcaagcgctttaaggtcaatggcagaaaaggaaatatcttcgtttcaaaacttgacagaaatcattcccacaaactgcgttgtgatgtgtgcgttcaactcaaagagtttaacctttcttttcatagagcagttaggaaacactctgtttgtaaagtctgcaagtggatattcagacctccttgaggccttcgttggaaacgggatttcttcatattctgctagacagaagaattctcagtaacttccttgtgttgtgtgtattcaactcacagagttgaatgatcctttacgcagaacagacttgaaacactcttgttgtggaatttgcaagtggagaattcagccgctttgagttcaacggtagaataggaaatatcttcctatagaaactagacagaacgattctcagaaactcctttgtgatgtgtgcgttcaactcacagagtttaacctttcttttcatagagcagttaggaagcactctgtttgtaaagtctgcaagtggatattcagacctctttgaggccttcgttggaaacgggatttcttcctattctgctagacagaagaattctcagtaacttccttgtgttgtgtgtattcaaatgacagagttgaactttcatttagagagagcagatttgaaacactgtttttgtggaatttgcaagtgaagatttcaagcgctttggggccaaaggcagaaaaggaaatatcttcgtataaaaactagacagaatcattctcagaaactgctctgtgatgtgtgcgtacaactctcagagtttaacttttcttttcattcagcagtttggaaacactctgtaaagtctgcacgtagatattttgaccacttagaggccttcgttggaaacgggtttttttcatgtaaggctagacagaagaattcccagtaacttccttgtgttgtgtgcattcaactcacagagttgaacgttcccttagacagagcagatttgaaacactctatttgtgcaatttgcaagtgtagatttcaagcgctttcaggtcaatggcagaaaaggaaatatcttcgtttcaaaactagacagaatcattcccacaaactgcgttgtgatgtgttcgttcaactcacacagcagttaggaaaccaactcacctttcttttcatagagcagttaggaaacactctgttggtaaattctgtaagtggatattctgacatcttgtggccttcgttggaaacgggatttcttcatattctgctagacagaagaattctcagtaacttccttgtgttgtgtgtattcaactcacagagttgaacgatcctttacacagagcagactttaaacactctttttgtggaatttgcaagtggagatttcagccgctttgaggtcaatagtagaaaaggaaatatcttcgtagaaaaactagaaagaatgattctcagaaactcctttgtgatgtgtgtgttctactcacagagtttaacctttcttttcatagagcagttagtaaacactctgtttgtaaagtctgcaagtggatattcagacccctttgaggccttcgttggaaacgggatttcttcatattatgctagacagaagaattctcagtaacttccttgtgttgtgtgtattcaactgacagagttgaactttcatttagagagagcagatttgaaacactgtttttgtggaatttgcaagtggagatttcaagcgctttggggccaaaggcagaaaaggaaatatgttcgtataaaaactagacagaatcattctcagaaactgctctgcgatgtgtgagttcaactctcagagtttaactttgcttttcattcagcagtttggaaacactctgtttgtaaagtctgcacgtggatattttgaccacttagaggccttcgttggaaacgggtttttttcatgtaaggctagacagaagaattcccagtaacttccttgtgttgtgtacattcaactcacagagttgaacgttcccttagacagagcagatttgaaacactctttttgtgcaattggcaagtggagatttcaagcgctttgaggtcaatggcagaaaaggaaatatcttcgtttcaaaactagacagaacgattctcagaaactcctttgtgatgtgtgcgttcaactcacagagtttaacctttcttttcatagagcagttaggaaacactctgtttgtaaagtctgcaagtggatattcagacctctttgtggccttcgttggaaacgggatttcttcatattctgctagacagaagaattctcagtaacttccttgtgttgtgtgtattcaactcacagagttgaacgatcctttacacagagcagacttgaaacactctttttgtggaatttgcaagtggagatttcagccgctttgaggtcaatagtagaaaaggtaatatcttcgtagaaaaactagacagaatgattctcacaaactcctttgtgatgtgtgtgttcaactcacagagtttaacctttcttttcttagagcagttaggaaacactctctttgtaaagtctgcaagtggatattcagacctctttgaggccttcgttggaaacgggtttttttcatataaggctagacagaataattctcagtaacttccttgtgttgtgtgtattcaactgtcagagttgaacgatcctttacagagagcagacttgaagcactctttttgtggaatttgcaagtggagatttcagccgctttgaggtcaatggtagaataggaaatatcttcctatagaaactagacagaatgattctcagaaactcctttgtgatgtgtgcgttcaactcacagagtttaacttttcttttcatagagcagttaggaaacactctgtttgtaaagtctgcaagtggatattcagacgtctttgaggccttcgttggaaacgggatttcttcatattatgctagacagaagaattctcagtaacttccttgtgttgtgtgtattcaactcacagagttgaacgatgctttacacatagcagacttgaaacactctttttgtggaatttgcaagtggagatttcagccgctttgaggtcaatggtagaaaaggaaatatcttcgtataaagactagacagaatgattctcagaaactcctttgtgatgtgtgcgttcaactcacagagtttaacctttcttttcatagagcagttaggaaacactctgtttgtaaagtctgcaagtggatattcagacctctttgaggccttcgttggaaacgggtttttttcttataaggctagacagaagaattctcagtaacttccttgtgttgtgtgtattcaactcacagagttgaacgatcctttacacagagcagacttgaaacactctttttctggaatttgcaagcggagatttcagctgcgttgaggtcaatggtagaaaaggaaatatcttcgtataaaaactagacagaatgattctcagaaactcctttgtgatgtgtgcgttcaactcacagagtttaacctttctgttcatagagcagttaggaaacactctgtttgtaaagtctgcaagtggatattcagacctctttgagaccttcgttggaaacgggatttcctcatattctgctagacagaagaattcccagtaacttccttgtgttgtgtgtgttcaactcacagagttgaactttcatttacacagagcagatttgaaacactctttttgtggaatttgcaagtggagatgtcaagcgctttgaggccaaaggcagaaaaggaaatatcttcgtataaaaactagacagaatcattctcagaaactgctgcgtgatgtgtgcgttcaactctcagagtttaacttttcttttcattcagcggtttggaaacactctgtttgtaaagtctgcacgtggatattttgaccacttagaggccttcgttggaaacgggttttttgcatgtaaggctagacagaagaattctcagtaacttccttgtgttgtgtgtattcaactcacagagttgaacgttcccttagacagagcagatttgaaacactctatttgtgcaatttgcaagtgtagttttcaagctctttaaggtcaacggcagaaaaggaaatatcttcgtttcaaaactagacagaatcattcccgcaaactgcgttgtgatgtgttcgttcaactcacagagtttaacctttctgttcatagagcagttaggaaacactctgtttgtaaagtctgtaagtggatattctgacatcttgtggccttcgttggaaacgggatttcttcatattctgctagacagaagaattctgagaaacttccttgtgttgtgtgttttcaactcacagagttgaacgatgctttacacagagtagacttgaaacactgtttttgtgtaatttgcaagtggagatttcagccgctttgaggtcaatggtagaaaaggaaatatcttcgaataaaaactagacagaatgattctcagaatcttctttgtgatgtgtgcgttcaactcacagagtttaacctttcttttcatagagcagttaggaaacactctgtttgtatactctgcaagtggatattcagtcctcattgaggccttcgttggaaacgggatttcttcatactatgctagacagaagaattcccagtaacttccttgtgttgtgtgtgttcaactcacagagttgaactttcatttacacagagcagatttgaaacactctttgtgtggaatttgcaagtggagatttcaagcgctttgaggccaaaggcagaaaaggaaatatcttcgtttcaaaactagacagaatcattctcagaaactgctctgcgatgtgtgcgttcaactctcagagtttaacttttcttttcattcagcagtttggaaacactctgtttgtaaactctgcaagtggatattcagacctctttgaggccttcgttggaaacgggatttcttcatactatgctagacagaagaattctcagtaacttccttgtgttgagtgtattcaactgacagagttgaactttcatttagagagagtagttttgaaacactgtttttgtggaatttgcaagtggagatttcaagcgctttggggccaaaggcagaaaaggaaatatcttcgtataaaaactagacagaatcgttctcagaaactgctgcgtgatgtgtgcgttcaactctcagagtttaacttttcttttcattcagcggtttggaaacactctgtttgtaaagtctgcacgtggacagtttgaccacttagaggccttcgttggaaacgggtttttttcatgtaaggctagacagaagaattcccagtaacttccttgtgttgtgtgcattcaactcacagagttaaacgttcccttagacagagcagatttgaaacactctatttgtgcaatttgcaagtgtagatttcaagcgctttaaggtcaacggcagaaaaggaaatatcttcgtttcaaaactagacagaatcattcccacaaactgcgttgtgatgtgttcgttcaactcacagagtttaacctttccgttcatacagcagttaggaaacactctgtttgtaaagtctgtaagtggatattctgacatcttgtggccttcgttggaaacgggatttcttcatattctgctagacagaagaattctcagtaacttccttgtgttgtgtgtattcaactcacagagttgaacgagcctttacacagagcagacttgaaacactctttttgtggaatttgcaagtggagatttcagccgctttgaggtcaatggtagaataggatatatcttcctatagaaactagacagaatgattctcagaaactcctttgtgatgtgtgcgttcaactcacagagtttaacctttcttttcatagagcagttaggaaacactctgtttgtaaagtctgcaattggatattcagacctctttgaggccttcgttggaaacgggatttcttcatattccgctagacagaagaattctcagtaacttccttgtgttgtgtgtattcaactcacagagttgaacgatcctttacacagagcagacttgaaacactctttttgtgtaatttgcaagtggagatttcagccgctttgaggtcaatagtagaaaaggaaatatcttcgtagaaaaactagacagaatgattctcagaaactcctttgtgatgtgggcgttcaactcacagagtttaacctttcttttcatagagccgttaggaaacactctgtttgtaaagtctgcacgtggatatttggacttctttgaggccttcgttggaaacgggtttttttcatgtaaggctagacggaagaattcccagtaacttccttgtgttgtgtacattcaactcacagagttgaacgttcccttagacagagcagatttgaaacactctttttgtgcaattggcaaatggagatttcaagcgctttaagttcaaaggcagaaaaggaaatatcttcgtttcaaaactagacagaatcattcccacaaactgcgttatgatgtgttcgttcatctcacagagtttaacctttcttttcatagagcagttaggaaacagtctgtttgtaaattctgtaagtggatattctgacatcttgtggccttcgttggaaacgggatttcttcatattctgctagacagaagaattctcaggaacttccttgtgttgtgtgtattcaactcacagagttgaacgatcctttacacagagcagacttgaaacacactttttgtggaatttgaaagtggagatttcagccgctttgaggtcaatggtagaataggaaatatcttcttatagaaactagacagaatgattctcagaaactcctttgtgatgtgtgcgttcaactcacagagtttaacctttcgtttcatagagcagttaggaaacactctgtttgtaaagtctgcaattggatattaagacctctttgaggccttcgttggaaacgggatttcttcatattctgctagacagaagaattctcagtaacttccttgtgttgtgtgtattcaactcacagagttgaacgatcctttacacagagcagtcttgaaacactctttttgtggaatttgcaagtggagatttctgccgttttgaggtcaatgatagaataggaaatatcttcctatagaaactagacagaatcattctcagaaactgctctgcgatgtgtgcgttcaactctcagagtttaacttttcttttcattcagcagtttggaaacactctgtttgtaaagtctgcacgtggataacttgaccacttataggccttcgttggaaacgggtttttttcatgtaaggctagacagaagaattcccagtaacttccttgtgttgtgtacattcaactcacagagttgaacgttcccttagacagagcagatttgaaacactctttttgtgcaattggcaagtggtgatttcagccgctttgaggtcaatggtagaaaaggaaatatcttcgtataaaaactagacagaatcattctcagaaactgcactgcgatgtgtgcgttcaactctcagagtttaacttttcttttcattcagcagtttggaaacactctgtttgtaaagtctgcacgtggataatttgaccacttagaggccttcgttggaaacgggtttttttcatgtaaggctagacagaagaattctcagtaacttccttgtgttgtgtgtattcaactcacagagttgaacgatcctttacacagagcagacttgtaacactctttttgtggaatttgccagtggagatttcagccgctttgaagtcaaaggtagaaaaggaaatatcttcctataaaaactagacagaatgattctcagaaacttctttgtgatgtgtgcgttcaactcacagagtttaacctttcttttcatagagcagttaggaaacactctgtttgtaaaatctgcaagtggatattcagacctctttgaggccttcgttggaaacgggatttcttcatactatgctagacagaagaattcccagtaacttccttgtgttgtgtgtgttcaactcacggagttgaactttcatttacacagagcagatttgaaacactctttttgtggaatttgcaagtggagatttcaagcgctttgaggccaaaggcagaaaaggaaatatcttcgtttgaaaactagacagaatcattctcagaaactgctctgtgatgtgtgcgttcaactctcagagtttaacttttcttttcattcagcagtttggaaacactctgtttgtaaagtctgcacgtggataatttgaccacttagaggccttcgttggaaacggttttttttaatgtaaggctagacagaagaattcccagtaacttccttgtgttgtgtgcattcaactcacagagttgaacgttcccttagacagagcagatttgaaacactctatttgtgcaatttgcatgtgtagatttcaagcgctttaaggtcaatggcagaaaaggaaatatcttcgtttcaaaactagacagaatcattcccacaaactgcgttgtgatgtgttcgttcaactcacagagttttacctttctgttcatagagcagttaggaaacactctgtaaagtctgtaagtggatattctgacatcttgtggccttcgttggaaacgggatttcttcatattctgctagacagaagaattctcagtaacttccttgtgttgtgtgtattcaactcacagagttgaacgatcctttacacagagcagacttgaaacactctgtttgtggaatttgcaagtggagatttcagccgctttgatgtcaatggtagaaaaatgaaatatcttcgtataaagactagacagaatgattctcagaaactcttttgtgatgtgtgcgttcaactcacagagtttaacctttctgttcatagagccgttaggaaacactctgtttgtaaagtctgcaagtggatattcacacctccttgagaccttcgttggaaacgggatttcttcatattctgctagacagaagaattcccagtaacttccttgtgttgtgtgtgttcaactcacagagttgaactttcatttacacagagcagatttgaaacactctttttgtggaatttgcaagtggagatttcaagcgctttgaggccaaaggcagaaaaggaaatatcttcgtttcaaaactagactagaatcattctcggaaactgctctgtgatgtgtgcgttcaactctcagagtttaacttttcttttcattcagcagtttggaaacactctgtttgtaaagtctgcacgtggatattttgaccacctaaaggccttcgttggaaacgtgtttttttcctgtaaggctagacagaagaattcccagtaacttccttgtgttgtgtacattcaactcacagagttgaacgttcccttagacagagcagatttgaaacactctttttgtgcaattggcaagtggtgatttcagccgctttgaggtcaatggtataaaaggaaatatcttcgtattaaaactagacagaatgattctcagaaacttcattgggatgtgtgcgttcaactcacagagtttaacctttcttttcatagagcagttaggaaacactctgtttgtaaactctgcaagtggatattcagacctctttgaggccttcgttggaaacgggatttcttcatactgtgctagacagaagaattctcagtaacttccttgtgttgtgtgcattcaactcacagagttgaacgatcctttacacagagcagattagaaaccctctttttgtggaatttgcaagtggagatttcaagcactttgaggtcaatggtagaaaaggaaatatcttcgtataaaaactagacagaatgattctcagaaacttctttgtgatgtgtgcgttcaactcacagagtttaacctttcttttcatagagcagttaggaaacactctgtttgtaaactctgcaagtggatattcagacctctttgaggccttcgttggaaacgggtttttttcatataaggctagacagaagagttctcagtaacttccttgtgttgtgtgtattcaactgacagagttgaactttcatttagagagagcagatttgaaacactgtttttgtggaatttgcaagtggagatttcaagcgctttggggccaaaggcagaaaaggaaatatcttcgtataaaaactagacagaatcattctcagaaactgctgcgtgatgtgtgcgttcaactctgagagtttaacttttcttttcattcagcggtttggaaacactctgtttgtaaagtctgcacgtggaaattttgaccacttagaggccttcgttggaaacgggattttttcatgtaaggctagacagaagaattctgagtaacttccttgtgttgtgtgtattcaactgacagagttgaactttcatttagagagagcagatttgaaacactgtttttgtggaatttgcaattggagatttcaagcgctttggggccaaaggcagaaaaggaaatatcttcgtataaaaactagacagaatcattctcagaaactgctctgcgatgtgtgcgttcaactctcagagtttaacttttcttttcattcagcagtttggaaacactctgtttgtaaagtctgcacgtggataatttgaccacttagaggccttcgttggaaacgggtttttttcatgtaaggttagacagaagaattctcagtaactttccttgtgttgtgtgtattcaactcacacagttgaacgatcctttacacagagcagacttgtaacactctttttgtggaatttgcaagtggagatttcagccgctttgaagtcaaaggtagaaaaggaaatatcttcctataaaaactagacagaaatgattctcagaaactcctttgtgatgtgtgcgttcaactcacagagtttaacctttcttttcatagagcagttaggaaacactctgtttgtaaagtctgcaagtggatattcagacctctttgaggccttcgttggaaacgggatttcttcatactatgctagacagaagaattctcagtaatttccgcgtgttgtgtgtattcaactcacagagttgaacgatcctttacacagagcagacttgaaacactctttttgtggaatttgcaagtggagatttcagccgctttgaagtcaaaggtagaaaaggaaatatcttcctataaaaactagacagaatcattctcagaaactgctgcgtgatgtgtgcgttgaactctcagagtttaacttttcttttcattcagcggtttggaaacactctgtttgtaaagtctgcacgtggatattttgaccacttagaggccttcgttggaaaccggtttttttcatgtaagcctagacagaagaattcccagtaacttccttgtgttgtgtgcattcaactcacagagttgaacgttcccttagacagagcagatttgaaacactctatttgtgcaatttgcaagtgtagttttcaagctctttaaggtcaacggcagaaaaggaaatatcttggtttcaaaactagacagaatcattcccacaaactgcgttgtgatgtgttcgttcaactcacagagtttaacatttctgttcatagagcagttaggaacactctgtttgtaaagtctgtaagtggatattctgacatcttgtggccttcgttggaaacgggatttcttcatattctgctagacagaagaattctcagtaacttccttgtgttgtgtgtattcaattcacagtgttgaacgatcctttacacagagcatacttgaaacactcttcttgtggaatttgcaagtggagatttcagccgatttgaggtcaatggtagaataggaaatatcttcgtataaaaactagacagaatgattctcagaaactcctttgtgatctgtgtgttcaactcacagagtttaacctttcttttcatagagcagttaggaaacactctgtttctaaagtctgcaagtggatattcagacctctttgaggccttcgttggaaacgggtttttttcatataaggctagacagaagaattctcagtaacttcattgtgttgtgtttattcaactcacagagttgaatgatcctttacacagagcagacttgaaacactctttttgtggaatttgcaagtggagatttcagccgctttgaggtcaatggtagaaaagtaaatatcttcgtataaagactagacagaatgattctcagaaacttctttgggatgtgtgcgttcaactcacagagtttaacctttcttttcatagagcagttaggaaacactctgtttgtaaactctgcaagtggatattcagacctctttgaggccttcgttggaaacgggatttcttcatactatgctagacagaagaattcccagtaacttccttgtgttgtgtgtgttcaactcacagatttgaactttcatttacacagagcagatttgaaacactctttttgtggaatttgcaagtggagatttcaatggctttgaggccaaaggcagaaaaggaaatatcttcgtttcaaaactagacagaatcattctcagaaactgctctgcgatgtgtgcgttcaactctcagagtttaacttttcttttcattcagcagtttggaaacactctgtttttaaagtctgcacgtggatattttgaccacttagacgccttcgttggaaactggtttttttccagtaaggctagacagaataattctcagtaacttcccttgggttgtgtgtattcaactcacagagttgaaggatcctttacagagagcaggcttgaaacactctttttgtcgaatttgcaagtggagatttcagccgctttgtggtcaatggtagaataggaaatatcttcttatagaaactagacagaatgattctgagaaactcctttgtgatgtgtgcgttcaactcacagagtttaacctttcttttcatagagcagttaggaaacactctgtttctaaagtgtgcaagtggatattcagacctccttgaggccttcgttggaaacgggatttcttcatattatgctagacagaagaattcccagtaacttccttgtgttgtgtgtgttcaactcacagtgttgaactttcatttacacagagcagattggaaacactctttttgtggaatttgcaagtggagatttcaagcgctttgaggccaaaggcagaaaaggaaatatcttcgtataaaaactagacagaatgattctcagaaacttctttgtgatgtgtgcgttcaactcacagagtttaacctttcttttcatagagcagttaggaaacactctgtttgtgaactctgcaagtggatattcagacctgtttgaggccttcgttggaaacgggatttcttcatactattctagacagaagaattctcagaaactcccttgtgttgtgtgtattcaactgacagagttgaactttcatttagacagagcagatttgaaacactctttatgtggaattggcaagtggagatttgaagcgctttgagaccaaaggcagaaaaggaaatatcttcgtttcaaaactagacagaatcattcccacaaactgcgttgtgatgtgttcgttcaactcacagggtttaacctttcttttcatagagcagttaggaaacactctgtttgtaaagtctgtaagtggatattctgacatcttgtggccttctttggaaacgggatttcttcatattctgctagacagaagaattctcagtaacttccttgtgttgtgtgtattcaactgacagagttgaaggatcctttacagagagcaggcttgaaacactctttttgtcgaatttgcaagtggagatttcagccgctttgaggtgaatggtagaataggaaatatcttcttatagaaactagacagaatgattctcagaaactcctttgtgatgtgtgcgttcaactcacagagtttaacctttcttttcatagagcagttaggaaacactctgtttgtaaagtctgcacgtggatatttggacttctttgaggccttcgttggaaacgggtttttttcatgtaaggctagacggaggaattctcagtaacttccttgtgttgtgtgtattcaactgacagagttgaactttcatttagagagaggagatttgaaacactgtttttgtggaatttgcaagtttagatttcaagcgctttggggccaaaggcagaaaaggaaatatcttcgtataaaaactagacagaatcattctcagaaactgctctgcgatgtgtgcgttcaactctcagagtttaacttttcttttcattcagaagtttggaaacactctgtttgtaaagtctgcacgtggatattttgaccatttagaggctttcgttggaaacgggtttttttcttgtaaggctagacagaagaattctcagtaacttcattgtgttgtgtgtattcaactcacagagttcaacgatcctttacacagagcagacttgaaacactctttttctggaatttgcaagtggagatttcagccgctttgaggtcaatggtagaaaagaaatatcttcctataaaaactagacagaatgattctcagaaactcctttgtgatgtgtgcgttcaactcacagaggttaacctttcttttcatagagcagttaggaaacactctgtttgtaaagtctgcaagtggagattcagacctgcttgaggcattcgttggaaacgggatttcttcatattatgctagacagaagaattctcagtaagttccttgtagtgtgtgtattcaactcacagagttgaacgatcctttacacagagcagacttgaaacactctttttgtgtaatttgcaagtggagatttcagccgctttgaggtcaatggtagaataggaaatatcttcctatagaaactagacagaatgattctcagaaactcctttgtgatgtgtgcgttcaactcacagagtttaacctttcttttcatagagcagttgggaaacactctgtttgtatagtgtgcaagtggatattcagacctctttgaggccttcgttggaaacgggatttcttcatattctgctagacagaagaattcccagtaactttccttgtgttgtgtgtgttcaactcacagagttgaacttccatttacacagagcagatttgaaacactctttttgtggaatttgcaagtggagatttcaagcgctttgaggccaaaggcagaaaaggaaatatcttcgtttcaaaactagacagaatcattctcagaaactgctctgcgatgtgtgcgttcaactctcagagtttaacctttcttttcattcagcagtttggaaacactctgtttgtaaagtctgcacgtggatattttgaccatttagaggccttcgttggaaacgggtttttttcttgtaaggctagacagaagaattcccagtaacttccttgtgttgtgtacattcaactcacagagttgaacgttcccttagacagagcagatttgaaacactctttttgtgcaattggcaagtggagatttcaagcgctttaaggtcaatggcagaaaaggaaatatcttcgtttcaaaactagagagaatcattcccacaaactgcgttgtgatgtgttcgttcaactcacagagtttaacctttcttttcatagagcagttgggaaacagtctgtttgaaaattctgtaagtggatattctgacatcttgtggccttcgttggaaacgggatttcttcatattctgctagacagaagaattctcagtaacttccttgtgttgtgtgtattcaactcacagagttgaacgatcctttacacagagcagacttgaaacactctttttgtggaatttgcaagtggagatttcagccgctttgaggtcaatagtagaaaaggaaatatcttcgtagaaaaactagacaagaatgattctcagaaactcctttgtgatgtgtgcgttcaactcacaaagttcaacctttcttttcatagagcagttgggaaacactctgtttgtaaagtctgcaagtggatattcagacttctttgaggccttcgttggaagcagggatttcttcatattctgctagacagaaaaattctcagtaacttccttgtgttgtgtgtattcaactcacagagttgaacgatcctttacacagagcagacttgaaacactctttttgtcgaatttgcaagtggagatttcagccgctttgaggtcaatggtagaataggaaatatcttcttatagaaactagacagaacgattctcagaaactgctttgtgatgtgtgcgttcaactcacagagtttaacctttcttttcatagagcagttaggaaacactctgtttgtaaagtctgcaagtggatattcagacctctttgaagccttcgttggaaacgggattgcttcatattctgctagacagaagaattctcagaaacttccttgtgttgtgtgtattcaactcacagagtttaacgatcgtttacacagaacagacttgagacactctttttgtggaatttgtaagtggagatttcagccactttgaggtcaatggtagaaaaggaaatatcttcatataaaaactagacagaataattctcagaaactgctgcgtgatgtgtgcgttcaactctcagagtttaacttttcttttcattcagcggtttggaaacactctgtttgtaaagtctgcacgtggttattttgaccacttagaggccttcgttggaaacgggttttcttcatgtaaggctagacagaagaattcccagtaacttccttgtgttgtgtacattcaactcacagagttgaacgttcccttagacagagcagatttgaaacactctttttgtgcaattggcaagtggtgatttcagcctctttgaggtcaatggtagaaaaggaaatatcttcgtacaaaaactagacagaatgattctcagaaactcctttgtgatgtgtgcgttccactcacagagtttaacctttcttttcatagagcagttaggaaacactctgtttgtaaagtctgcaagtggatattcagacctccttgaggccttcgttggaaacgggatttctacatattatgctagacagaagaattctcagtaacttccttgtgttgtgtgtattcaactcacagagttgaacgatcctttacacagagcagacttgaaacactctttttgtgaaatttgcaagtggagatttcagcctctttgaggtcaatggtagaataggaaatatcttcctatagaaactagacagaatgattctgagaaactcctttgtgatgtgtgcattcaactcacagagtttaacctttcttttcatagagcagttaggaaacactctgcttgtaaagtctgcaagtggatactcagacctccttgaggccttcgttggaaacgggatttcttcctattatgctagacagaagaattcccagtaacttccttgtgttgtgtgtgttcaactcacagagttgaactttgatttacacagagcagatttgaaacactctttttgtggaatttgcaagtggagatttcaagcgctttgaggccaaaggcagaaaaggaaatatcttctgtataaaaactagactagaatcattctcagaaactgctgcgtgatgtgtgcgttcaactctcagagtttaacttttcttttcattcagcggtttggaaacaccctgtttgtaaagtctgcacgtggatattttgaccacttagaggccttcgttggaaacgggattttttcatgtaaggctagacagaagaattcccagtaacttccttgtgttgtgtacattcaactcacagagttgaacgttcccttagacagagcagatttgaaacactctttttgtgcaattggcaaatggagatttcaagcgctttaaggtcaatggcaggaaaggaaatatcttcgtttcaaaactagacagaatgattctcagaaccttctttgtgatgtgtgcgttcaactcacagagtttaacctttcttttcatagagcagttaggaaacactctgtttgtaaactctgcaagtggatattcagacctctttgaggccttcgttggaaacgggatttcttcatactatgctagacagaagaattctcagtaacttccttgtgttgtgtgtattcaactcacagagttgaacgatcctttacacagagcagacttgtaacactctttttgtggaatttgcaagtggagatttcagccgctttgaagtcaaaggtagaaaagggaatatcttcctataaaaactagacagaatgattctcagaaactcctttgtgatgtgtgcgttcaactcacagagtttaacttttcttttcatagagcagttaggaaacactctgtttgtaaagtctgcaagtggatattcagacctctttgaggccttcgtttgaaatgggatttcttcatattatgctagacagaagaattctcagtaacttccttgtgttgtgtgtattcaactgacagagttgaactttcatttagagagagcagatttgaaacactgtttttgtggaatttgcaagtggagatatcaagcgctttggggccaaaggcagaaaaggaaatatcttcgtataaaaactagacagaatcattctcagaaactgctctgtgatgtgtgcgttcaactctcagagtttaacttttcttttcattcagcagtttggaaacactctgtttgtaaagtctgcacgtggataatttgaccacttagaggccttcgttggaaactggtttttttcatgtaaggctagacagaaagaattcccagtaacttccttgtgttgtgtacattcaactcacagagttgaacgttcccttagacagagcagatttgaaacactctttttgtgcaattggcaaatggagatttcaagcgctttaagttcaatggcagaaaaggaaatatcttcgtttcaaaactagacagatcattcccacaaactgcgttgtgatgtgttcgttcaactcacagagtttaacctttcttttcgtagagcagttaggaaacagtctgtttgtaaattctgtaagtggatattctgacatcttgtggccttcgttggaaacgggatttcttcatattctgctagacagaagaattctcagaatcttccttgtgttgtgtgtattcaactcacagagttgaacgatcctttacacagagcagacttgtaacactctttttgtggaatttgcaagtggagatttctgccgctttgaagtcaaaggtagaaaaggaaatatcttcctataaaaactagacagaatgattctcagaaactcctttgtgatgtgtgcgttcaactcacatagtttaacctttcttttcatagagcagttaggaaacactctgtttgtaaagtctgcaagtggatattcagacatcctagaggctttcgttggaaacgggatttcttcatattctgctagacagaagaattctcagaaacttcgttgtgttgtgtgttttcaactcacagagttcaacgatcctttacacagagtagacttgaaacactctttttgtggaagtggcagggtggagatttcagccgctttgaggtcaatggtagaaaaggaaatatcttcgtatgaaaactagacagaatgattctcagaaactcctttgtgatgtgtgcgttcaactcacagagtttaacttttcttttcatacagcagttaggaaacactctgtttgtaaagtctgcaagtggatattcagacctctttgaggccttcgttggaaacgggatttcttcatattatgctagacagaagaattctcagtaacttccctgtgttgtgtgtattcaactcacagagttgaacgatcctttacacagagcagacttgaaacactctttttgtggaatttacaagtggagatttcagccgatttgaggtcaatggtagaaaaggaaatatcttcctatagaaactagacagaatgattctcagaaactcctttgtgatgtgtgcgttcaactcacagagtttaactttccttttcatagagcagttaggaaacactctgtttgtaaagtcttcatgtggatattcattcctctttgaggccttcgttggaaacgggatttcttcatattctgctagacagaagaattctcagtaacttccttgtgttgtgtgtattcaactcacagagttcaacgatcctttacacagagcagacttgaaacactctttttgtggaatttgcaagtggagatttcagccgctttgaagtcaatggtagaaaaggaaatatcttcgtataaaaactagacagataatcattcccacaaactgcgttgtgatgtgttcgttcaactcacagagtttaaccgttcttttcatagagcagttaggaaacactctgtttgtaaattctgtaagtggatattctgacatcttgtggccttcgttggaaacgggatttcttcatgttctgctagacagaagaattctcagtaacttccttgtgttgtgtgtattcaactcacagagttgaacagtggtttacacagagcagatttgaaacactctttttgtggaatttgcaagtggagatttcagccgctttgaggtcaatggtagaaaaggaaatatcttcgtataaaaactagacagaatgattctcataaactcctttgtgatgtgggcgttgaactcacagagtttaacctttcttttcatagagcagttaggaaccactctgtttgtaaagtctgcaaatggatattcagacctctttgaggccttctttggaaacgggatttgttcatattctgctagacacaataattctcagtaacttccttgtgttgtgtgtattcaactcacagagttgaacgatcctttatagagagcagacttgaaacactctttttgtggaatttgcaagtggagatttcagcctctttgaggtcaatggtagaataggaaatatcttcctatagaaactagacagaacgattctcagaaactcctttgtgatgtgtgcgttcaactcacagagtttaacctttcttttcatagagcagttaggaaacactctgtttgtaaagtctgcacgtggatattcagacgtctttgaggccttcgttagaaacgggatttcttcctattctgctagacagaagaattctcagtaacttccttgtgttgtgtgtattcaactcacagagttgaacgatcctttacacagagcagacttgaaacactctttttgtggaatttgcaagtggagatttcagccgctttcaggtcaagagaagaaaaggaaatatcttcgtagaaaaactagacagaatgattctcagaaactcctttgtgatgtgtgctttcaagtcacagagtttaacctttcttttcatagagcagttaggaaacactctgtttgtaaagtctgcaagtggatattcagacgtctttgaggccttcgttggaaacgggatttcttcatattctgctagacagaagaattcccagtaacttccttgtgttgtgtgtgttcaactcacagagttgaactttcatttacacagagcagattagaaacactctttttgtggaattcgcaagtggagatttcaagcgctttgaggccaaaggcagaaaaggaaatatcttcgtttcaaaactagacagaatcattctcagaaactgctctgcgatgtgtgcgttcaactctcagagtttaacttttcttttcattcagcagtttggaaacactctgtttgtaaagtctgcacgtggatattttgaccacttagaggccttcgttggaaacgggttttattcctgtaaggctagacagaagaattcccagtaactaccttgtgttgtgtgcattcaactcacagagttgaacgttcccttagacagagcagatttgaaacactctatttgtgcaatttgcaagtgtagatttcaagcgctttaaggtcaacggcagaaaaggaaatatcttcgtttcaaaattagacagaatcattcccacaaactgcgttgtgatgtgttcgttcaactcacagagtttaacctttctgttcatagagcagttaggaaacactctgtttgtaaagtctgtaactggatattctgacatcttgtggccttcgttggaaacgggatttcttcatattctgctagacagaagaattctcagtaacttccttgtgttgtgtgtattcaactcacagagttgaacgaccctttacagagagcagacttgaaacactctttttgtggaatttgcaagtggagatttcagccgctttgaggtcaatggtagaaaaggaaactatcttcgtataaagactagacagaatgattctcagaaactgttttgtgatgtgtgcgttcaactcacagagttcaacctttcttttcatagagcagttgggaaacactctgtttgtaaagtctgcaagtggatattcagacttctttgaggccttcgttggaagcgggatttcttcatattctgctagacagaagaattcccagtaacttccttgtgttgtgtgtgttcaactcacagagttgaactttgatttacacagagcagatttgaaacactctttttgtggagtttgcaagtggagatttcaagcgctttgaggccaaaggcagaaaaggaaatatcttcgtataaaaactagagagaatcattctcagaaagtgctctgcgatgtgtgcgttcaactctcagagtttaacttttcttttcattcagcagtttggaaacactctgtttgtaaagtctgcacgtggatattttgaccacttagaggccttcgttggaaacgggtttttttcttgtaaggctagacagaagaattcccagtaacttccttgtgttgtgtgcattcaactcacagagttgaacgttcccttagacagagcagatttgaaacactctatttgtgtaatttgcaagtgtagatttcaagcgctttaaggtcaacggcagaaaaggaaatatcttcgtttcaaaactagacagaaatcattcccacaaactgcgttgtgatgtgttcgttcaactcacagtgtttaacctttcttttcatagagcaggtaggaaccagtctgtttgtaaattctgtaagtggatattctgacatcttgtggccttcgttggaaacggggtttcttcatattttgctagacagaagaattctcagtaacttccttgtgttgtgtttattcaactcacagagttgaatgctcctttacacagagcagacttgaaacactctttttgtggaatttgcaagtggagatttcagaggctttgaggtcaatggtagaaaagtaaatatcttcgtataaagactagacagaatgattctcagaaactcctttgtgatgtgtgcgttcaaatcacagagtttaacttttcttttcatagagcagttaggaaacactctgtttgtaaagtgtgcaagtggatattcagacctctttgaggccttcgttggaaacgggatttcttcatattatgctagacagaagaattctcagtaacttcccttgtgttgtgtgtattcaactcacagagttgaacgatcctttacacagagcagacttgaaacactctttttgtggaatttgcaagaggagatttcagccgctttgaggtcaatagtagaaaaggaaacatcttcgtagaaaaactagacagaatgattctcagaaactcctttgtgatgtgtgcgttcaactcacagagtttaactttccttttcatagagcagttaggaaacactctgtttgtaaagtctgcaagtggatattcagacctctttgaggccttcgttggaaacgggatttcttcatattctgctagacagaagaattcccagtaagttccttgtgttgtgtgtgttcaactcacagagttgaactttcatttacacagagcagatttgaaacactctttttgtggaatttgcaagtggagatttcaagcgctttgaggccaaaggcagaaaaggaaatgtcttcgtttcaaaactagacagaatcattctcagaaactgctgcgtgatgtgtgcgttcaactctcagagtttaacttttcttttcattcagcggtttggaaacactctgtttgtaaagtctgcacgtggatattttgaccccttagaggccttcgttggaaacgggtttttttcatgtaaggctagacagaagaattctcagtaagttccttgtgttgagtgttttcaactcacagagttgaacgatgctttacacagagtagacttgaaacactcttgttgtggaatttgcaagtggagatttcagccgctttgaggtcaatggtagaataggaaatatcttcctatagaaactagacagaatgattctcagaaactcctttgtgatgtgtgcattcaactcacagagtttaacctttcttttcatagagcagttaggaaacattctgtttgtaaagtctgcaagtggatattcagacctctttgaggacttcgttggaaacgggattttttcatattatgctagacagaagaattctcagtaacttccttgtgttgtgtgtattcaactcacagagttgaacgatcctttacacagagcagacttgaaacactcttgttggggaatttgcaagtggagatttcagccgctttgaggtcaatggtagaaaaggaaatatcttcctataaaaactagacagaatgattctcagaaactcctttgtgatgtgtgcgttcaactcacagagtttaacctttctgttcatagagcagttaggaaacactctgtttgtaaagtctgtaagtggatattcagacctccttgaggccttcgttggaaacgggatttcttcatattctgctagacagaagaattcccagtaacttccatgtgttgtgtgtgttcaactcacagagttgaaatttcatttacacagagcagatttgaaacactctttttgtggaatttgcaaatggagatttcaagcgctttgaggccagaggcagaaaaggaaatatcttcgtataaaaactagacagaatcattctcagaaactgctctgcgatgtgtgcgttcaactctcagagtttaacttttcttttcattcagcagtttggaaacactctgtttgtaaagtctgcacgtggataatttgaccacttagaggtcttcgttggaaacgggtttttttcatgtaaggctagacagaagaattcccagtaacttccttgtgttgtgtgcattcaactcacagagttgaacgttcccttagacagagcagatttgaaacactctatttgtgcaatttacaagtgtagatttcaagcgctttaaggtcaatggcagaaaaggaaatatcttcgtttcaaaactagacagaatgattctcataaactcctttgtgatgtgtgcgttcaacacacagagtttaacttttcttttcatagagcagttaggaaacactctgtttgtaaagtctgcaagtggatattcagacctctttgaggccttcgttggaaacgggatttcttcatattctgctagacagaagaattctcagtaacttccttgtgttgtgtgtattcaactcacagagttgaacgatcctttacagagagcagactttaaacactctttttgtggaatttgcaagtggagatttcagccgctttgaggtcaatggtagaaaaggaaatatcttcgtataaagactagacagaatgattctcataaactcctttgtgatgtgtgcgttcaactcacagagtttaacctttcttttcatagagcagttaggaaacactctgtttgtaaagtctgcaagtggatattcagacctccttgaggccttggttggaaacgggatttcttcatattctgcttgacagaagaattctcagtaacttccttgttttgtgtgtattcaactcacagagttgaacgatcctttacacagagcagacttgaaacactctttttgtggaatttgcaagtggagatttcagccgcgttgaggtcaatggtagaaaaggaaatatcttcgtataaaaactagacagaatgattctcagaaactcctttgtgatgtgtgcgttcaactcacagagtttaacctttcttttcatagagcagttgggaaacactgtttgtaaagtctgcaagtggatattcagacatccttgaggctttcgttggaaacgggatttcttcatattctgctagaaagaagaattctcagtaacttccttgtgttgtgtgtattcaactcacagagttgaacgatcctttacagagagcagacttgaaacactctttttgtggaatttgcaagtggagatttcagccgctttgaggtcaacggtagaaaaggaaatatcttcgtataaagactagacagaatgattctcagaaactcctttgtgatgtgtgcgttcaacacacagagtttaacttttcttttcatagagcagttaggaaatactctgtttgtaaagtctgcaagtggatattcagacctctttgaggccttcgttggaaacggaatttcttcatattatgctagacagaagaattctcagtaacttccttgtgttgtgtgtattcaactgacagagttgaactttcttttagagagagcagatttgaaacactgtttttgtggaatttgcaactggagatttcaagcgctttggggccaaaggcagaaaaggaaatatcttcgtataaaaactagacagaatcgttctcagaaactgctctgcgatgtgtgcgttcaactctcagagtttaacttttcttttcattcagcagtttggaaacactctgtttgtaaagtctgcacgtggataatttgaccacttagaggccttcgttggaaacgggtttttttcatgtaaggctagacagaataattcccagtaacttccttgtgttgtgtacattcaactcacagagttgaacgttcccttagagagagcagatttgaaactctctttttgtgaaattagcaagtggagatttcaagggctttaaggtcaatggcagaaaaggaaatatcttcgtttcaaaactagacagaatgattctcataaactcctttgtgatgtgtgcgttcaactcacagagtttaacctttctttccatagagcagttgggaaacactctgtttgtaatgtctgcaagtggatattcagacttccttgaggccttcgttggaaacgggatttcttcatattctgctagacagaagaattctcagtaacttccttgtgttgtgtgtattcaactcacagagttgaatgatcctttacacagagcagacttgaaacactctttttgtggaatttgcaagtggagatttcacccgctttgaggtcaacgggagaaaaggaaactatcttcgtataaagactagacagaatgattctcagaaactcctttgtgatgtgggcgttcaactcacagagtttaaccttccttttcatagagcagttaggaaacactctgtttgtaatgtctacacgtggatatttggatttctttgaggccttcgttggaaacgggattttttcatgtaaggctagacggaagaattctcagtaacttccttgtgttgtgtgtattcaactgacagagttgaactttcatttagagagagtagatttgaaacactgtttttgtggaatttgcaagtggagatttcaagcgctttggggccaaaggcagaaaaggaaatatcttcgtataaaaactagacagaatcattctcagaaaccgctctgtgatgtgtgcgttcaactctcagagtttaacttttctttccattcagcagtttggaaacactctgtttgtaaagtctgcacgtggatattttgaccacttagaggtcttcgttggaaacgggtttttttcatgtaaggctagacagaagaattcccagtaacttcccttgtgttgtgtgcattcaactcacagagatgaacgttcccttagacagagcagatttgaaacactctatttgtgcaatttgcaagtgtagatttcaagcgctttaaggtcaatggcagaaaaggaaatatcttcgtttcaaaactagacagaatcattcccacaaactgcgttgtgatgtgttcgttcaactcacagagtttaaactttctgttcatagagcagttaggaaacactctgtttgtaaagtctgtaagtggatattccgacatcttttggccttctttggaaacgggatttcttcatattctgctagacagaagaattctcagtaacttccttgtgttgtgtttattcaactcacagagttgaatgatcctttacacagagcagacttgaaacactctttttgtggaatttgcaagtggagatttcagccgctttgtggtcaatggtagaaaaggaaatatcttcctataaagactagacagaatgattctcagaaactcctttgtgatgtgttcgttcaactcacagagtttaacctttcttttcatagaggagttaggaaacactctgtttgtaaagtctgcaagtggatattcagacctctttgaggccttcgttggaaacgggtttttttcatataaggctagacagaagaattctcagtaacttcccttgtgttgtgtgtattcaactgacagagttgaactttcatttagagagagcagatttgaaactctgtttttgtggaatttgcaagtggagatttcaagcgctttggggccaaaggcagaaaaggaaatatcttcgtataaaaactagacagaatcattctcagaaactgctctgcgatgtgtgcgttcaactctcagagtttaacttttcttttcattcagcagtttggaaacactctgtttgtaaagtctgcacgtggataatttgaccacttagaggccttcgttggaaacgggtttttttcatgtaaggctatacagaagaattataagtaacttccttgtgttgtgtgtattcaactcacagagttgaacgatcctttacacagagcagacttgaaacactctttttgtggaatttgcaagtggagatttcagccgctgtgaggtcaatggtagaataggacatatcttcctatagaaactagacagaatgattctcagaaactcctttgtgatgtgtgcgttcaactcacacagtttaacctttcttttcatagagcagttaggaaacactctgtttgtaaagtctgcaagtggatatacagacctccttgaggcattcgttggaaacgggatttcttcatattatgctagacagaagaattctcagtaacttccttgtgttgtgtgtattcaactgacagagttgaactttcatttagagagagcagatttgaaacactgtttttgtggaatttgcaagtggagatttcaagcgctttggggccaaaggcagaaaaggaaatatcatcgtataaaaactagacagaatcattctcagaaactgctgagtgatgtgtgcgttcaactctcagagtttaacttttcttttcattcagcggtttggaaacactctgtttgtaaagtctgcacgtggatattttgaccacttagaggccttcgttggaaacgggtttttttcatgtaaggctagacagaagaattcccagtaacttccttgtgttgtgtacattcaactcacagagttgaacgttcccttagacagagcagatttgaaacagtctttttgtgcaattggcaagtggtgatttcagccgctttgtggtcaatggtataaaaggaaatatcttcgtataaaaactagacagaatcattcccacaaactgcgttgggatgtgttcgttcaactcacagagtttaacctttctgttcatagagcagttaggaaacactctgtttgtaaagtctgtaagtggatattctgacatcttgtggccttcgttggaaacgggatttcttcatattctgctagacagaagaattctcagtaacttccttgtgttgtgtgtattcaactcacagagttgaacgatcctttacacagagcagacttgaaacactctttttgtggaatttgcaagtggagatttcagccgcgttgaggtcaatggtagaaaaggaaataacttcgtataaaaactagacagaatgattctcagaaactcctttgtgatgtgtgcgttcaactcacagagtttaacttttcttttcatagagcagttaggaaacactctgtttgtaaagtctgcaagtggatattcagacctccttgaggccttcgttggaaacaggatttcttcatattctgctagacagaagaattctcagtaacttccttgtgttgtgtgtattcaactgacagagttgaactttcatttagagagagcagatttgaaacactgtttttgtggaatttgcaagtggagatttcaagcgctttggggccaaggacagaaaaggaaatatcttcgtataaaaactagacagaatcattctcagaaactgctgcgtgatgtgtgcgttcaactctcagagtttaacttttcttttcattcagcggtttggaaacactctgtttgtaaagtctgcacgtggatattttgaccacttagtggccttcgttggaaacgggttttttttcatgtaaggctagacagaagaattcccagtaacttccttgtgttgtgtacattcaactcacagagttgaacgttcccttagacagagcagatttgaaacactctttttgagaaattggcaagtggagatttcaagcgctttaaggtcaatggcagaaaaggaaatatcttcgtttcaaaactagacagaatcattcccacaaactgcgttgtgatgtgttcgttcaactcacagagtttaaccgttcttttcatagagcagttaggaaacactctgtttgtaaattctgtaagtggatattctgacatcttgtggccttcgttggaaacgggatttcttcatgttctgctagacagaagaattctcagtaacttccttttattgtgtgtattcaactcacagagttgaacgatcctttacacagagcagacttgaaacactctttttgtggaatttgcaagtggagatttcagccgctttgaggtcaatggtagaaaaggaaatatcttcgtataaaaattagacagaatgattctcagaaactcctttgtgatgtgtgcgttcaactcacagagtttaacctttcttttcatagagcagttaggaaacactctgtttgtaaagtctgcaagtggatattcagacctctttgaggccttcgttggaaacgggtttttttcatataagggtagacaaaagaattaccactaacatccttgtgttgtgtgtgttcaactcacagagttgaactttcatttacacagagcagatttgaaagactctttttgtggaatttgcaaatggagatttcaagcgctttgaggccaaagacagaaaaggaaatatcttcgtttcaaaactagacagaatcattctcagaaactgctctgcgatgtgtgcgttcaactctcagagtttaacttttcttttcattcagcagtttggaaacactctgtttgtaaagtctgcacgtggataacttgaccacttagaggccttcgttggaaacgggttttattcacgtaaggctagacagaagatttcccagtaaattccttgtgttgtgtacattcaactcacagagttgaacgttcccttagacagagcagatttgaaacactctttttgtgcaattgggaagtggagatttcaagcgctttaaggtcaatggcagaaaaggaaatatcttcgtttcaaaactacacagaatcattcccacaaactgcgttgtgatgtgttcgttcatctcacagagtttaacctttcttttcatagagcagttaggaaacagtctgtttgtaaattctgtaagtggatatcctgacatcttgtggccttcgttggaaacgggatttcttcatattctgctagacagaagaattctcagaaacttccttgtgttgtgtgtattcaactcacagagttgaacgatagtttacacagagcagacttgaaacactctttttgtggaatttgcaagtggagatttcagccgctttgaggtcaatgttagaaaaggaaatatcttcgtataaaaactagacagaatgattctcagaaacttctttgtgatgtgtgcgttcaactcacagagtttaacctttctgttcatagagcagttaggaaacactctgtttgtaaactctgcaagtggatattcagacctcctttgaggccttcgttggaaacgggatttctccatactgtgctagacagaagaattcccagtaacttccttctgttgtgtgtgttcaactcacagagttgaactttcatttacacagagcagatttgaaacactctttttgtggaatttgcaaatggagatttcaagcgctttgaggccaaaggcagaaaaggaaatatcttcgtttcaaaactagacagaatcattctcagaaactgctctgcgatgtgtgcgttcaactctcagagtttaacttttcttttcattcagcagtttggaaacactctgtttgtaaagtctgcacgtggataatttgaccacttagaggccttcgttggaaacggggttttttcatgtaaggctagacagaagaattctcagtaacttccttgtgttgtgtgtactcaactcacagagttgaacgatcctttacacagagaggacttgaaacactctttttgtggaatttgcaagtggagatttcagccgcgttgaggtcaatggtagaaaaggaaatatcttcgtataaaaactagacacaatgattctcagaaacgcctttgtgatgtgtgtgttcaactcacagagtttaacctttcttttcatagagcagttaggaaacactctgttggtaaagtctgcaagtggatattcagacctctttgaggccttcgttggaaacgggtttttttcatataaggctagacagaagaattctcagtaactttccttgtgttgtgtgtattcaactgacagagttgaactttcatttagagagagcagatttgaaacactgtttttgtggaatttgcaagtggagatttcagccgctttgaggtcaatagtagaaaaggaaatatcttcgtagaaaaactagacagaatgattctcagaaacttctttgtgatgtgtgcgttcaactcacagagtttaacctttcttttcatagagcagttaggaaacactctgtttgtaaactctgcaagtggatattcagacctctttgaggccttcgttggaaacaggatttcttcatactatgctagacagaagaattctcagtaacttccttgtgttgtgtgtattaaactcacagagttgaacgatcctttacacagagcagacttgaaacactctttttttggaatttgcaagtggagatttcagccgctttgaggtcaatggtagaataggaaatatcttcctatagaaactagacagaatgattctcagaaacttctttgtgatgtgtgcgttcaactcacagagtttaacctttctttacatagagcagttaggaaacactctgtttgtaaactctgcaattggatattcagacctctttgaggccttcgttggaaacgggatttcttcatactatgttagacagaagaattcccagtaactttccttgtgttgtgtgtattcaactcacagagttgaactttcatttacacagagcagattggaaacactctttttgtggaatttgcaagtggagatttcaagcgctttgaggccaaatgcagaaaaggaaatatcttcgtataaaaactagacagaatcattctcagaaactgctctgcgatgtgtgcgttcaactctcagagtttaacttttcttttcattcagcagtttggaaacactctgtttgtaacgtctgcacgtggatattttgaccacttagaggccttcgttggaaacgggtttttttcatataaggctagacagaagaattcccagtaacttccttgtgttgtgtacattcaattcacagatttgaaggttcccttagacacagcagatttgaaacactctttttgtgcaattggcaagtggagatttcaagcgctttaaggtcaatggcagaaaagggaatatcgtcgtttcaaaactagacagaatcattcccacaaactgcgttgtgatgtgttcgttcaactcacagagtttaacctttctcttcatagagcagttaggaaacactctgtaaagtctgtaagtggatattctgacatcttgtggccttcgttggaaacgggatttcttcatattctgctagacagaagaattcccagtaacttccttgtgttgtgtgtattcaactcacagagttgaacgatcctttacacagagcagacttgtaacactctttttctggaatttgcaagtggagatttcagccgctttgaagtcaaaggtagaaaaggaaatatcttcctataaaaactagacagaatgattctcagaaactcctttgtgatgtgtgtgttcaactcacagagtttaacctttcttttcatagagcagttaggaaacactctgtttgtaaagtctgcaagtggatattcagacctctttgagaccttcgttggaaacgggattttttcatataaggctagacagaagaattcccagtaacttccttgtgttgtgtgtgttcaactcacagagttgaactttcatttacacagagcagatttgaaacactctttttgtggaatttgcaaatggagatttcaagcgcattgaggccaaaggcagaaaaggaaatatcttcgtataaaaactagacagaatcattctcagaaactgctgcgtgatgcgtgcgttcaactctcaaagtttaacttttcttttcattcagcggtttggaaacactctgtttgtaaagtctgcacgtggatattttgaccacttagaggccttcgttggaaacgggtttttttcatgtaaggctagacagaagaattcccagtaacttccttgtgttgtgtacattcaactcacagagttgaacgttcccttagacagagcagatttgaaacactctttttgtgcaattggcaagtggtgatttcagcctctttgaggtcaatggtagaaaaggaaatatcttcgtataaaaactagacagaatcattcccacaaactgcgttgttatgtgttcgttcaactcacagagtttaacctttcttttcatagagcagttaggaaacagtctgtttgtaaattctgtaagtggatattctgacatcttgtggccttcgttggaaacgggatttcttcatattctgctagacagaataattctcagtaacttccttgtgttgtgtgtattcaactcacagagttgaacgatgctttacacagagcagacttgaaacattctttttgtggaatttgcaactggagatttcagccgctttgaggtcaatggtagaataggaaacatcttcctatagaaactagacagaatgattctcagaaactcctttgtgatgtgtgtgttcaactcacagagtttaacctttcttttcatagagcagttaggaaacactctgtttgtaaagtctgcaagtggatattcagacctctttgaggccttcgttggaaacgggttttttcatataaggctagacagaagaattcccagtaacttccttgtgttgtgtgtgttcaactcacagagttgaactttcatttacacagagcagatttgaaacactctttttgtggaatttgcaggtggagatttcaagcgctttgaggccaaaggcagaaaaggaaatatcttcatataaaaactagacagaatcattctcagaaactgctctgcgatgtgtgcgttcaactctcagagtttaacttttcttttcattcagcagtttggaaacaatctgtttgtaaagtctgcacgtggataacttgaccacttagaggacttcgttggaaacgggtttttttcctgtaaggctagacagaagaattcccagtaacttccttgtgttgtgtacattcaactcacagagttgaacgttcccttagacagagcagatttgaaacactctttttgtgcaattggcaaatggagatttcaagcgctttaaggtcaatggcagaaaaggaaatattcttcgtttcaaaactagacagaatcattcccacaaactgcgttgtgatgtgttcgttcaactcacagagtttaacctttctgttcatagagcagttaggaaacacactgtttgtaaagtctgtaagtggatattctgacatcttgtggccttcgttggaaacgggatttcttcatattctgctagacagaaagaattctcagtaacttccttgtgttgtgtgtattcaactcacagagttgaacgatcctttacacagagcagacttgaaacactctttttgtggaatttgcaagtggagatttcagccgctttgaggtcaatggtagaataggaaatatcttcctatagaaactagacagatgattctcagaaactcctttgtgatgtgtgcgttcaactcacagagtttaacctttcttttcatagagcagttaggaaacactctgtttgtaaagtctgcaggtggatattcagacatccttgaggctttcgttggaaacgggatttcttcatattctgctagaaagaagaattctcagtaacttcattgtgttgtgtgtattcaactcacagagttcaacgatcctttacacagagcagacttgaaacactctttttgtggaatttgcaagtggagatttcagccgctttgaggtcaatggtagaaaaggaaatatcttcctataaaaactagacagaatgattctcagaaactcctatgtgatgtgttcgttcagctcacagagtttaacctttcttttcatagagcagttaggaaacactctgtttgtaaagtctgcaagtggatatttagacctctttgaggccttcgttcgaaacgggatttcttcatattctgctagagagaagaattctcagtaacttcccttgtgttgtgtgtattcaactcacagagttgaacgatcctttacacagagcagacttgaaacactctttttgcggaatttgtaagtggagatttcagccgctttgaggtcaatggtagaaaaggaattatcttcgtataaaaactagacagaatgattctcagaaactcctttgtgatgtgtgcgttcaactcacagagtttaacctttcttttcatagagcagttaggaaacactctgtttgtacagtctgcaagtggatattcagacatccttgaggctttcgttggaaacgggatttcttcatattctgctagaaagaagaattctcagtaacttccttgtgttgtgtgtattcaactgacagagttgaactttcatttagagagagcagatttgaaacactgtttttgtggaatttgcaagtggagatttcaagcgctttggggccaaaggcagaaaaggaaatatcttcgtataaagactagacagaatgattctcagaaacttcattgtgatgtgtgcgttcaactcacagagtttaaccgttcttttcatagagcagttaggaaacactctgtttgtaaactctgcaagtggatattcagacctctttgaggccttcgttggaaacggtatttcttcatactgtgctagacagaagaatactcagtaacttccttgtgttgtgtgtattcaactcacagagttgaacgatggtttacacagagcagatttgaaacactctttttgtggaattagcaattggagatttcagccgctttgaggtcaatggtagaaaaggaaatatcttcgtataaaaactagacagaatgattctcagaaactcctttgtgatgtgtgcgttcaactcacagagtttaacctttcttttcatagagcagttaggaaacactctgtttgtaaagtctgcaagtggatattcagacctctttgaggccttcgttggaaacgggtttttttcatataagtctagacagaagaattcccagtaacttccttgtgttgtgtgtgttcaaatcacagagttgaactttcatttacacagagcagatttgaaacactctttttgtggaatttgcaagtggagatttcaagcgctttggggccaaaggcagaaaaggaaatatcttcgtttcaaaactagacagaatcattctcagaaactgctgcgtgatgtgtgcgttcaactctcagagtttaacttttcttttcattcagcggtttggaaacactctgtttgtaaagtctgcacgtggaaattttgaccactcagaggccttcgttggaaacgggtttttttcatgtaaggctagacagaagaattccaagtaacttccttgtgttgtgtgcattcaactcacagagttgaacgttcccttagacagagcagatttgaaacactctatttgtgcaatttgcaagtgtagatttcaagcgctttaaggtcaatggcagaaaaggaaatatcttcgtttcaaaactagacagaatcattcccacaaactgcgttgtgatgtgttcgttcaactcacagagtttaacctttctgttcatagagcagttaggaaacactctgtttgtaaagtctgaaagtgcatattctgacatcttgtggccttcgttggaaacgggatttcttcatattctgctagatagaagaattctcagtaacttccttgtgttgtgtgtattcaactcacagagttgaacgatccctttacacagagcagacttgaaacactctttttgtggaatttgcaagtggagatttcagccgctttgaggtcaatagtcgaaaaggaaatatcttcgtagaaaaactagacagaacgattctcagaaactcctttgtgatgtgtgcgttcaactcacagagtttaacctttcttttcatagagcagttaggaaacactctgtttgtaaagtctgcaagtggatattcagacctctttgaggccttcattggaaacgggatttcttcatattctgctagacagaagaattcccagtaacttccttgtgttgtgtgtgttcaactcacagagttgaactttgatttacacagagcagatttgaaacactctttttgtggaatttgcaagtggagatttcaagcgctgtgaggccaaaggcagaaaaggaaatatcttcgtataaaaactagacagaatcattctcagaaactgctctgcgatgtgtgcgttgaactctcagagtttaacttttcttttcattcagcagtttggaaacactctgtttgtaaagtctgcacgtggatattttcaccacttagaggccttcgttggaaacgggtttttttcctgtaaggctagacagaagaattcccagtaacttccttgtgttgtgtgcattcaactcacagagttgaacgttcccttagacagagcagatttgaaacactctctttgtgcaatttgcaagtgtagatttcaagcgctttaaggtcaacggcagaaaaggaaatatcttcgtttcaaaactagacagaatcattcccacaaacttcgttgtgatgtgttcgttcaactcacagagtttaaccttcctgttcatagagcagttaggaaacactctgtttgtaaagtctgtaagtggatattctgacatcttgtggccttcgttggaaacgggatttcttcatattctgctagacagaagaattctcagtaacttccttgtgttgtgtgtattcaactcacagagttgaacgatcctttacacagagcagacttgaaacactctttttgtggaatttgcaagtggagatttcagccgcgttgaggtcaatggtagaaaaggaaatatcttcatataaaaactagacagaatgattctcagaaactcctttgtgatgtgtgtgttcaactcacacagtttaacctttcttttcatagagcagttagtaaacactctgtttataaagtctgcaagtggatattcagacccctttgaggccttcgttggaaacgggatttcttcatattatgctagacagaagaattcccagtaacttccttgtgttgtgtgtgttcaactcacagagttgaactttcatttacccagagcagatttgaaacactctttttgtggaatttgcaagtggagatttcaagcgctttgaggccaaaggcagaaaaggtaatatcttcgtataaaaactagacagaacgattctcagaaactcctttgtgatgtgtgcgttcaactcacagagtttaacttttcttttcatagagccattaggaaacactctgtttgtaaagtctgcaagtggatactcagacctctttgaggccttcgttggaaacgggtttttttcatgtaaggctagacagaagaattcccagtaacttccttgtgttgtgtgcattcaactcacagagttgaacgttcccttagacagagcagatttgaaacactctatttgtgcaatttgcaagtatagatttcaagcgctttcaggtcaacggcagaaaaggaaatatcttcgtttcaaaactagacagaatcattcccaaaaactgcgttgtgatgtgttcgttcatctcacagagtttaacctttcttttcatagagcagttaggaaacagtctgtttgtaaattctgtaagtggatattctgacatcttgtggccttcgatggaaacgggatttcttcatattctgctagacagaagaattctcagtaacttccttgtgttgtgtgtattcaactcacagagttgaacgatcctttacacagagcagacttgaaacattctttttgtggaatttggaagtggagatttcagccgctttgaggtcaatggtagaatagggaatatcttcctatagaaactagacagaatgattcccacaaaatcctttgtgatgtgtgtgttcaactcacagagtttaacctttcttttcatagagcagttagtaaacactctgtttataaagtctgcaagtggatattcagacccctttgaggccttcgttggaaacgggatttcttcatattatgctagacagaagaattctcagtaacttccttgtgttgtgtgtattcaactgacagagttgaactttcatttagagagagcagatttgaaacactgtttttgtggaatttgcaagtggagatttcaagcgctttggggtcaaaggcagacaacgaaatatcttcgtataaaaactagacagaatcatgctcagaaactgctctgcgatgtgtgccttcagctctcagagtttaacttttcttttcattcagcagtttggaaacactctgtttgtaaagcctgcacgtggatattttgaccacttagaggtcttcgttggaaacgggtttttgtcatgtaaggctagacagaagaattaccagtaacttccttgtgttgtgtgcattcaactcacagagatgaacgttcccttagacagagcagatttgaaacactctatttgtgcaatttgcaagtgtagatttcaagcgcttaaaggtcaatggtagaaaaggaaatatcttcgtttcaaaactagacagaatcattcccacaaactgcgttgtgatgtgttcgttcaactcacagagtttaacctttctgttcatagagcagttaggaaacactctgtttgtaaagtctgtaagtggatattctgacatcttgtggccttcgttggaaacgggatttcttcgtattgtgctagacagaagaattctcagtaacttccttgtgttgtgtgtattcaactcacagagttgaacgatcctttacacagagcggacttgtaacattctttttgtggaatttgcaagtggagatttcagccgctttgaagtcaaaggtagaaaaggaaatatcttcctataaaaactagacagaatgattctcagaaactcctttgtgatgtgtgcattcaactcacagagtttaacctttcttttcatagaacagttaggaaacactctgtttgtaaagtcttcaggtggatattcagacctcttagaggccttcgttggaaacaggatttcttcatataatgctagacagaagaattctcagtaacttcattgtattgtgtgtattcaactcacagatttcaacgatcctttacacagagcagacttgaaacactctttttctggaatttgcaagtggagatttcagccgctttgaggtcaatggtagaataggaaatatcttcctatagaaactagacagaatgattctcagaaactcctttgtgatgtgtgcgttcaactcacagagtttaacctttcttttcatagagcagttaggaaacactctgtttgtagagtctgcaagttgatattcagacctccttgaggccttcgttggaaacgggatttcttcatattatgctagacagaagaattcccagtaacttccttgtgttgtgtacattcaactcacagagttgaacgttcccttagacagagcagacttgtaacacactttttgtggaatttgcaagtggagatttcagccgctttgaagtcaaaggtagaaaaggaaatatcttcctataaaaactagacagaatgattctcagaaactcctttgtgatgtgtgcgttcaactcacagagtttaacctttcttttcatagaggagttaggaaacactctgtttgtaaagtctgcaagtggatattcagacctccttgaggcctttgttggaaacgggatttcttcatatcctgctagacagaagaattctcagtaacttccttgtgttgtgtgtattcaactcacagagttgaacgatcctttacagagagcagacttgaaacactctttttgtggaatttgcaagtggagatttcagccgctttgagatcaatggtagaataggaaatatcttcctatagaaactagacagaatcattctcaaaaactgctgcgtgatgtttgcgttcaactctcagagtttaacttttcttttcattcagcggtttggaaacactctgtttgtaaagtctgcacgtggatattttgaccacttagaggccttcgttggaaacgggtttttttcatgtaaggctagacagaagaattcccagtaacttccttgtgttgtgtgcattcaactcacagagttgaacgtttccttagacagagcagatttgaaacactctatttgtgcaatttgcaagtgtagatttcaagcgctttaaggtcaatggcagaaaaggaaatatcttcgtttcaaaactagacagaatcattcccaaaaactgcgttgtgatgtgttcgttcaactcacagagtttaacctttctgttcatagagcagttaggaaacactctgtttgtaaagtctgtaagtagatattctgacatcttgtggccttcgttggaaacgggatttcttcatattctgctagacagaaagaattctcagtaacttccttgtgttgtgtgtattcaactcacagagttgaacgatcctttacacagagcagacttgaaacactctatttgtggaatttgcaagtggagatttcagccgctttgaggtcaatgatagaaaaggaaatatcttcgtataaaaactagacagaatgattctcataaactcctttgtgaagtgtgcgttcaactcacagagtttaacctttcttttcatagagcagttaggaaacactctgtttgttaagtctgtaagtggatattcagacctccttgaggccttcgttggaaacgggatttcttcatattatgctagacagaagaattctcagaatcttccttgtgttgtgtgtattcaactcacagagttgaacgatggtttacacagagcagatttgaaacactctttttgtggaatttgcaagtggagatttcagccgctttgaggtcaatggtagaaaatgaaatatccttcgtataaaaactagacagaatgattctcagaaaatcttttgtgatgtgtgcgttcaactcacagagtttaacttttcttctcatagagcagttaggaaacactctgtttgtaaagtctgcaagtggatattcagacctccttgaggccttcgttggaaacgggatttcttcatattatgctaaacagaagaattcccagtaacttccttgtgttgtgtgtattcaactcacagagttgaactttcatttacacagagcagattggaaacactctttttgtggaatttgcaagtggagatttcaagcgctttgaggccaaaggcagaaaaggaaatatcttcgtataaaaactagacagaatcattctcagaaactgctctgcgatgtgtgccttcagcgctcagagtttaacttttcttttcattcagcagtttggaaacactctgtttgtaaagtctgcacgtggatattttgaccacttagaggccttcgttgcaagcgggtttttgtcatgtaaggttagacagaagaattcccagtaacttccttgtgttgtatacattcaactcacagagttgaacgttcccttagacagagcagatttgaaacactctttttgtgcaattggcaagtggagatttcaagcgctttgaggtcaatggcagaaaaggaaatatcttcgtttcaaaactagacagaatgattctcagaaactcctttgtgatgtgtgcgttcaactcacagagtttaacctttctattcatagagcagttaggaaacactctgtttgtaaagtctgcaagtggatattcagacatccttgaggctttcgttggaaacgggatttcttcatattctgctagaaagaagaattctcagaaacttccttgtgttgtgtgtattcaactcacagagttgaacgatcctttacacagagcagacttgaaacactctttttgtggaatttgcaagtggagatttcagccgctttgaggtcaatggtagaaaaggaaatatcttcgtataaaaactagacagaatgattctcagaaactcctttgagatgtgtgtgttcaactcacagagtttaacccttcttttcatagagcagttaggaaacactctgtttgtaaagtctgcaagtggatattcagacctctttgaggccttcgttggaaaccggatttcttcatactgtgctagacagaagaattcccagtaacttccttgtgttgtgtgtgttcaactcacagagttgaacttccatttacacagagcagatttgaaacactctttttgtggaatttgcaagtggagatttcaagcactttgaggccaaaggcagaaaaggaaatatcttcgtttcaaaactagacagaatgattctcagaaactcctttgtgatgtgtgcgttcaactcacagagtttaacctttcttttcatagagcagttaggaaacactctggttgtaaagtctgcaagtggatattttgaccacttagaggccttcgttggaaacgggttttttttcatgtaagactagacagaagaattctcagaaacttccttgtgttgtgtgttttcaactcacagagttgaacgatgctttacacagagtagacttgaaacactctttttgtggaatttgcaagtggagatttcagccgctttgaggtcaatggtagaaaaggaaatatctttgtataaaaactagacagaatgattctcagaaactcctttgtgatgtgtgcgttcaactcacagagtttaacctttcttttcatagagcagttaggaaacactctgtttgtaaagtgtgcaagtggatattcagacctctttgaggccttcgttggaaacgggatttcttcatattctgctagagagaagaattctcagtaacttccttgtgatgtgtgtattcaactcacagagttcaacgatcctttacacagagcagacttgaaacactctttttgtggaatttgcaagtggagatttcagccgctttgaggtcaatggtagaataggaaatatcttcctatagaaactagacagaatgattctcagaaactcctttgtgatgtgtgtgttcaactcacagagtttaacctttcttttcatagagcagttagtaaacactctatttataaagtctgcaattggatattcagacccctttgaggccttcgttggaaacgggatttcttcatattatgttagacagaagaattcccagtaacttccttgtgttgtgtgtgttcaactcacagagttgaactttcatttccacagagcagatttgaaacactctttttgtggaatttgcaaatggagatttcaagcgctttgaggccaaaggcagaaaaggatatatcttcgtataaaaactagacagaatcattctcagaaactgctctgcgatgtgtgcgttcaactctcagagtttaacttttcttttcattcagcagtttcgaaacactctgtttgtaaagtctgcacgtggataatttgaccacttagaggccttcgttggaaacgggtttttttcatgtaaggatagacagaagaattcccagtaacttccttgtgttgtgtacattcaactcacagagttgaacgttcccttagacagagcagatttgaaacactctttttgtgcaactggcaagtggagatttcaagcgctttgaggtcaatggcagaaaaggaaatatcttcgtttcaaaactagacagaatcattcccacaaactgcgttgtgatgtgttcgttcaactcacagactttaacctttcttttcatagagcagttaggaaacagtctgtttgtaaattctgtaagtggatattctgacatcttgtggccttcgttggaaacgggatttcttcatattctgctagacagaagaattctcagtaacttccttgtgttgtgtgtattcaactcacagagttgaacgatcccttacacagagcagacttgaaacactctttttgtggaatttgcaagtggagatttcagccgctttgaggtcaatggtagaaaaggaaatatcttcgtataaaaactagacagaatgattctcagaaactcctttgtgatgtgtgtgttcaactcacagaatttaacctttcttttcatagagcagttagtaaacactctgtttataaagtctgcaagtggatattcagacccctttgaggccttcgttggaaacgggatttcttcatattatgctagacagaagaattctcagtaacttccctgtgttgtgtgtattcaactcacagagttgaacgatcctttacagagagcagacttgaaacactctttttgtggaatttgcaagtggagatttcagccgctttgaggtcaatggtagaataggaaatatcttcctatagaaactagacagaatgattctcagaaactcctttgtgatgtgtgcgttcaactcacagagtttaacctttcttttcatagagcagttaggacacactctgtttgtaaagtctgcaagtggatattcagacctctttgaggccttcgttggaaacgggatttcttcatattatgctagacagaagaattctcagtcacttccttgtgttgtgtgtattcaactgacagagttgaactttcatttagagagagcagatttgaaacactgtttttgtggaatttgcaagtggagatttcaagcgctttggggccaaaggcagaaaaggatatatcttcgtataaaaactggacagaatcattctcagaaactgctctgcgatgtgtgcgttcaactctcagagtttaacttttcttttcattcagcagtttggaaacactctgtttgtaaagtctgctcgttgataatttgaccacttagaggccttcgttggaaacgggtttttttcatataaggctagacagaagaattcccagtaacttccttgtgttgtgtgcattcaactcacagagttgaacgttcccttagacagagcagatttgaaacactctatttgtgcaatttgcaagtgtagatttcaagcgctttcaggtcaatggcagaaaaggaaatatcttcgtttcaaaactagacagaatcattcccacaaactgcgttgtgatgtgttcgttcaactcacagagtttaacctttcttttcatagagcagttaggaaacagtctgtttgtcaattctgtaagtggatattctgacatcttgtggccttcgttggaaacgggttttcttcatattctgctagacagaagaattctcagtaacttccttgtgttgtgtgtattcaactcacagagttcaacgatgctttacacagagtagattgaaacacacttttttttgaatttgcaagtggagatttcagccgctttgaggtcaatggtagaataggaaatatcttcctatagaaactagacagaatgattctcagaaacttctttgtgatgtgtgcgctcaactcacagagtttaacctttcttttcatagagcatttaggaaacactctgtttgtaaagtctgcaagtggatattcagacctctttgaggccttcgtaggaaacgggatttcttcatattatgctagacagaagaattcccagtaacatccttgtgttgtgtgtgttcaactcacagagttgaactttcatttacacagatcagatttgaaagactctttttgtggaatttgcaaatggagatttcaagcgctttgaggccaaaggcagaaaaggaaatatcttcgtataaaaactagacagaatcattctcagaaactgctctgcgatgtgtgcgttcaactgtcagagtttaacttttcttttcattcagcagtttggaaacactctggttgtaaagtctgcacgtggatattttgaccacttagaggccttcgttggaaacgggtttttttcctgtaaggctagacagaagatttcccagtaatttccttgtgttgtgtgcttcaactcacagaattgaacgttccgttagacagagcagatttgaaacactctatttgtgcaatttgcaagtgtagatttcaagcgctttaaggtcgttggcagaaaaggaaatatcttcgtttcaaaagtagacagaatgattctcagaaacttcattgtgatgtgtgtgttcaactcacagagtttaacctttcttttcatagagcagttgggaaacagtctgtttgtaaattctgtaagtggatattctgacatcttgtggccttcgttggaaacgggatttcttcatattctgctagacagaagaattctcagtaacttccttgtgttgtgtgtattcaacccacagagttgaacgatcctttacacagagcagacttgaaacactctttttctggaatttgcaagtggagatttcagccgctttgaggtcaatggtagaataggaaatatcttcctatagaaactagacagaatgattctcataaactactttgtgatgtgtgcgttcaactcacagagtttaacctttcttttcatagagcagttaggaaacactctgtttgtaaagtctgcaagtggatattcagacctctttgaggccttcgttggaaacgggatttcttcatattctgctagacagaagaattctcagtaacttccttgtgttgtgtgtattcaactcacagagttgaacgatcctttacacagagcattcttgaaacactctttttgtggaatttgcaagtggagatttcagccgctttgaggtcaatagtagaaaaggaaatatcttcgtagaaaaactagacagaaatcattctcagaaactgctgcgtgatgtgtgcgttcaactctcagagtttaacttttcttttcattcagcggtttggaaacactctgtttgtaaagtctgcaagtggatattttgaccacttagaggccttcgttggaaacgggtttttttcatgtaaggctagacagaagaattcccagtaacttccttgtgttgtgtgcattcaactcacagagttgaacgttcccttagacagagcagatttgaaacactctatttgtgcaatttgcaagtgtagatttcaagcgctttaaggtcaatggcagaaaaggaaatgtcttcgtttcaaaactagacagaatgattctcagaaacttcattgtgatgtgtgcgttcaactcacagagtttaacctttcttttcatagagcagttaggaaacactctgtttgtaaactctgcaagtggatattcagacctctttgctgccttcgttggaaacgggatttcttcatactgtgctagacagaagaattctcagtaacttccttgtgttgtgtgtatttaactcacaaaattgaacgatcctttacacagagcggacttgaaacactctttttgtgtaatttgcaagtggagatttcagccgcgttgaggtcaacggtagaaaaggaaatatcttcgtataaaaactagacagaatgattctcagaaactgctttgtgatgtgtgcgttcaactcacagagttcaacctttcttttcatagagcagttgggaaacactctgtttttaagtctgcaagtggatattcagacttctttgaggccttcgttggaagcgggatttcttcatgttctgctagacagaggaattcccagtaacttccttgtgctgtgtgtgttcaactcacagagttgaactttcatttacacagagcagatttgaaacactctttttgtggaatttgcaaatggagatttcaagcgctttgaggccaaaggcagaaaaggaaatatcttcgtttcaaaactagacagaatcattctcagaaactgctctgcgatgtgtgccttcaactctcagagtttaacttttcttttcattcagcagtttggaaacactctgtttgtaaagtctgcacgtggatattttgaccacttagaggccttcgttggaatcgggtttttttcctctaaggctagacagaagaattctcagaaacttccttgtgttgtgtgtattcaactcacagagttgaacgatcgtttacacagagcagacttgagacactctttttgtggaatttgtaagtggagatttcagccgctttgaggtcaatggtagaaatggaaatatcttcatataaaaactagacagaatcattcccacaaactgcgttgtgatgtgttcgttcaactcacagactttaacctttctgttcatagagcagttaggaaacactctgtttgtaaagtctgcaagtggatattcagacctccttgaggccttcgttggaaacgggatttcttcatattctgctagacagaagaattcccagtaacttccttgtgttgtgtgtgttcaactcacagagttgaactttcatttacacagcgcagatttgaaacactctttttgtggaatttgcaagtggagatttcaagcgctttgaggccaaaggcagaaaaggaaatatcttcgtataaaaactagacagaatcattctcagaaactgctgcgtgatgtgtgcgttcaactctcagagtttaactttgcttttcattcagcggtttggaaacactctgtttgtaaagtctgcacgtggatattttgaccacttagtggccttcgttggaaacgggtttttttcatgtaaggctagacagaagaattcccagtaacttccttgtgttgtgtacattcaactcacagagttgaacgttcccttagacagagcagatttgaaacactctttttgtgcaattggcaagtggagatttcaagcgctttgaggtcaatggcagaaaaggaaatatcttcgtttcaaaactagacagaatgattctcataaactcctttttgatgtgtgcgttcaacacacagagtttaacctttctgttcatagagcagttcggaaacactctgtttgtaaagtttgtaagtggatattctgacatcttgtggccttcgttggaaacgggatttcttcatattctgctagacagaagaattctcagaaacttccttgtgttgtgtgtattcaactcacagagttgaatgatcctttacacagagcagacttgaaacactctttttgtggaatttgcaagtggagatttcagccgctttgtggtcaatggtagaaaaggaaatatcttcgtataaagactagacagaatgattctgagaaactcctttgtgatgtgtgcgttcaactcacacagtttaacctttcttttcatagagcagttaggaaacactctgtttgtaaagtctgcaagtggatattcagacctccttgaggctttcgttggaaacgggatttcttcatattctgctagaaagaagaattctcagtaactgccttgtgttgtgtgtattcaactcacagagttgaacgatcctttacacagagcagacttgaaatactctttttgtggaatttgcaagtggagatttcagccgctttgaggtcaatggtagaataggaaatatcttcctatagaaactagacagaatgattctcagaaactcctttgtgatgtgtacgttcaactcacagagtttaacctttcttttcatagagcagttaggaaacactctgtttgtaaagtctgcaagtggatattcagacatctttgaggctttctttggaaacgggatttcttcatattctgctatacagaagaattctcagaaacttccttgtgttgtgtgttttcaactcacagagttcaacgatcctttacacagagtagacttgaaacactgtttttgtggaattggcaagtggagatttcagccgctatgaggtcaatggtagaaaaggaaatatcttcgtataaaaactagacagaatgattctcagaaactcctttgtgatgtgtgcgttcaactcacagagtttaacctttcttttcatagagcagttgggaaacactctttttgtaaagtctgcaagtggatattcagacatccttgaggctttccttggaaacgggatttcttcatattctgctagaaagaagaattctcagtaacttccttgtgttgtgtgtattcaactcacagagttgaatgatcctttacaaagaacagtcttgaaacactctttttgtggaatttgcaagtggagatttcagccgctttgaggtcaatggtagaataggaaatatcttcttatagaaactagacagaatgattctcagaaactactttgtgatgtgtgtgttcaactcacagagtttaacctttcttttcatagagcagttagtaaacactctgtttataaagtctgcaagtggatattccgacccctttgaggccttcgttggaaacgggatttcttcatattatgctagacagaagaattctcagtaacttccttgtgttgtgtgtattcaagtgacagagttgaactttcatttagagagagcagatttgaaacactgtttttgtggaatttgcaagtggagatttcaagcgctttggggccaaaggcagaaaaggaaatatcttcgtatataaactagacagaatgattctcagaaactcctttgtgatgtgtgcattcaactcacagagtttaaccattcttttcatagagcagttaggaaacactctgtttgtaaagactgcaagtggatattcagacctccttgaggccttcgttggaaacgggacttcttcatattatgctacacagaagaattctcagtaacttccttgtgttgtgtgtattcaactcacagagttgaacgatcctttacacagaacatacttgaaacactctttttgtggaatttgcaagtggagatttcagccgctttgaggtcaatggtagaataggaaatatcttcctatagaaactagacagaatgattctcagaaactcctttgtgaagtgtgcgttcaactcacagagtttaacctttctgttcatagagcagttaggaaacactctgtttgtaaagtctgcaagtggatattcagacctccttgaggccttcgttggaaacgggatttcttcatattctgctagacagaagaattctcagtaacttccttgtgttgtgtgtattcaactgagagagttgaactatcatttagagacagcagatttgaaacactgtttttgtggaatttgcaagtggagatttcaagcgctttggggccaaaggcagaaaaggaaatatcttcgtataaaaactagacagaatgattctcagaaactcctttgtgatgtgtgcgttcaactcacagagtttaacctttcttttcatagagcagttaggaaacactctgtttgtaaagtctgcacgtggatattttgaccacttagaggccttcgttggaaacgggttttcttcctgtaaggctagacagaagaattcccagtaacttccttgtgttgtgtacattcaactcacagagttgaacgttcccttagacagagcagatttgaaacactctttttgtgcaattggcaaatggagatttcaagcgctttaaggtcaatggcagaaaaggaaatatcttcgtttcaaaaatagacagaatcattcccacaaactgcgttgtgatgtgttcgttcaactcacagagtttaacctttctgttcatagagcagttaggaaacactctgtttgtaaagtctgtaactggatattctgacattttgtggccttcgttggaaacgggatttcttcatattctgctagacagaagaattctcagtaactgccttgtgttgtgtgtattcaactcacagagttgaacgatccttaacacagagcagacttgaaacactctttttgtggaacttgcaagtggagatttcagccgctttgaggtcaatggtagaataggaaatatcttcctatagaaactagacagaatgattctcataaactcctttgtgatgtgtgcgttcaactcacagagtttaacctttctgttcatagagcagttaggaaacactctgtttgtaaagtctgcaagtggatattcagaactccttgaggccttcgttggaaacgggatttcttcatattctgctagacagaagaattctcagtaacttccttgtgttgtgtgtattcaactcacagagttgaacgatcctttacacagagcagacttgaaacactctttttgtggaatttgcaaggggagatttcagccgctttgagttcaatggtagaataggaaatatcttcctatagaaactagacagaatgattctcagaaactcctttgtgatgtgtgccttcaactcacagagtttaacctttcttttcatagagcagttaggaaacactctgtttgtaaagtctgcaagtggatattcagacctctttgaggccttcgttggaaacgggatttcttcatactatgctagacagaagaattctcagtaacttccttgtgttgtgtgtattcaactcacagagttgaacgatcctttacacagagcagacttgaaacactctttttgtggaatttgcaaggggggatttctgccgctttgaggtcaatggtagaataggaaatatcttcctatagaaactagacagaacgattctcagaaactcctttgtgatgtgagcgttcaactcacagagtttaacctttcttttcatagagcagttaggaaacactctgtttgtaaagtctgcaagtggatattcagacctctttgaggccttctttggaaacgggatttcttcatattctgctagacagaagaattctcagtaacttccttgtgttgtgtgtattcaactgacagagttgaactttcatttagagagagcagatttgaaacactgtttttgtggaatttgcaagtggagatttcaagcgctttggggccaaaggcaaaaaaggaaatatcttcgtataaaaactagacagaatcattctcagaaactgctctgcgatgtgtgcgttcaactctcagagtttaacttttcttttcattcagcagtttggaaacactctgtttgtaaagtctgcacgtggatattttgaccacttagaggtcttcgttggaaacgggtttttttcctgtaaggcttgacagaagaattcccagtaacttccttgtgttgtgtgcattcaactcacagagttgaaagttcccttagacagagcagatttgaaacactctatttgtgcaatttgcaagtgtagatttcaagcgctttaaggtcaatggcagaaaaggaaatatcttcgtttcaaagctagacagaatcattcccacaaactgcgttgtgatgtgtgcgttcaactcaaagagtttaacctttcttttcatagagcagttaggaaacactctgtttgtaaagtcttcaagtggatattcagacctccttgaggccttcgttggaaacgggatttcttcatattctgctagacagaagaattctcagtaacttccttgtgttgtgtgtattcaactcacagagttgaacgatcctttacacagagcagacttgaaacactctttttctggaatttgcaagtggagatttcagccgctttgaggtcaattgtagaataggaaatatcttcctatagaaactagacagaatgattctcagaaacacttttgtgatgtgtgcgttcaactcacagagtttaacctttcttttcatagagcagttaggaaacactctgtttgtaaagtctgcaagtggatattcagacctctttgaggccttcgttggaaacgggatttcttcatattctgctagacagaaggattcccagtaacttccttgtgttgtgtgtgttcaactcacagagttgaactttcatttacaaagagcagatttgaaacactctttttgtggaatttgcaattggagatttcaagcgctttgaggccaaaggcagaaaaggaaatatcttcgtataaaaactagacagaatcattctcagaaactgctctgcgatgtgtgcgttcaactctcagagtttaacttttgttttcattcagcagtttggaaacactctgtttgtaaagtctgcacgtggataatttgaccacttagagttcttcgttggaaacgggtttttttcatgtaaggctagacagaagaattctcagtaacttccttgtgttgtgtgtattcaactcacagagttgaacgatcctttacacagagcagacttgtaacactctttttgtggaatttgcaagtggagatttcagccgctttgaagtcgaaggtacaaaaggaaatatcttcctataaaaactagacagaatgattctcagaaactcctttgtgatgtgtgcgttcaactcacagagtttaacctttcttttcatagagcagttaggaaacactctgtttgtaaagtctgcaagtggatattcagacatccttgaggctttcgttggaaacgggatttcttcatgttctgctagaaagaagaattctcaataacttccttgtgttgtgtgtattcaactgacagagttgaaccttccttcagatagagcagatttgaaacactctttttgtgtaatttgcaagtggagatttcaagcgctttgaggccaaaggcagaaaaggaaatatcttcgtataaaaactagacagaatcattcccacaaactgcgttgtgatgtgttcgttcaactcacagagtttaacctttcttttcatagagcagttaggaaacagtctgtttgtaaattctgtaagtggatattctgacatcttgcggccttcgttggaaacgggatttcttcatattctgctagacagaagaattcccagtaacttccttgtgttttgtacattcaacccacagagttgaacgtttccttagacagagcagatttgaaacactctttttgtgcaattggcaagtggtgatttcaaccactttcaggtcaaaggtagaaaaggaaatatcttcctataaaaactagacagaatcattcccacaaactgcgttgtgatgtgttccttcaactcacagagtttaacgtttccgttcatagagcagttaggaaacacactgtttgtaaagtctgtaagtggatattctgacatcttgtggccttcgttggaaacgggatttcttcatattctgctagacagaagaattctcagtaacttccttgtgttgtgtgtattcaactcacagagttgaatgatcctttacacagagcagacttgaaacgctctttttgtggaatttgcaagtggagatttcagccgcgttgaggtcaatggtagaaaaggaaatatcttcgtataaaaactagacagaatgattctcagaaacttctttgtgatgtgtgcgctcaactcacagagtttaacttttcttttcatagagcagttaggaaacactctgtttgtaaactctgcaagtggatattcagacctctttgaggccttcgttggaaacgggatttcttcatattatgcctgagagaagaattctcagtaacttccttgtgttgtgtgcattcaactcacagagttgaacgttcccttagacagagcagatttgaaacactctatttgtgcaatttgcaagtgtagatttcaagcgctttgaggccaacggcagaaaaggaaatatcttcgtagaaaaaatagacggaaatcattcccacaaactgcgttgtgatgtgttcgttcatctcacagagtttaagctttcttttcatagagcagttaggaaacactctgtttgtaaattctgtaagtggatattctgacatcttgtggccttcgttggaaacgggatttcttcatattctactagacagaagaattcccagtaacttccttgtgttgtgtacattcaactcacagagttgaacgttcccttagacagagcagatttgaaacactctttttgtgcaattggcaagtggagatttcaagcgctttgaggtcaatggcagaaaaggaaatatcttcgtttcaaaactagacagaatcattcccacaaactgcgttgtgatgtgttcgttcaactcacagagtttaacctttcttttcatagagcagttaggaaacagtctgtttgtgaattctgtaagtggatattctgacatcttgtggccttcgttggaaacgggatttcttcatattctgctagacagaagaattctcagaaacttccttgtgttgtgtgtattcaactcacagagttgaacgatcctttacagagagcagacttgaaacactctttttgtggaatttgcaagtggagatttcagccgctttgaggtcaatggtagaataggaaatatcttcctatagaaactagacagaatgattctcagaaactcctttgtgatgtgtgcgttcatctcacagagtttaacttttcttttcatggagcagttaggaaacactctgtttgtaaagtctgcaagtggatattcagacctctttgaggccttcgttggaaacgggatttcttcgtattctgctagacagaggattcccagtaacttccttgtgttgtgtgtgttcaactcacagagttgaactttcatttacaaagagcagatttgaaacactctttttgtggaatttgcaagtggagatttcaagcgctttgaggccaaaggcagaaaaggaaatatcttcgtataaaaactagacagaatcattctcagaaactgctgcgtgacgtgtgcgttcaactctcagagtttaacttttcttttcattcagcggtttggaaacactctgtttgtaaagtctgcacgtggatattttgaccacttagaggccttcgttggaaacgggtttttttcatgtaaggctagacagaagaattcccagtaacttccttgtgttgtgtgcattcaactcacagagttgaacgttcccttagacagagcagatttgaaacactctatttgtgcaatttgcaagtgtagatttcaagcgctttaaggtcaatggcagaaaagaaaatatcttcgtttcaaaactagacagaatcattcccacaaactgcgttgtgatgtgttcgttcaactcacagagtttaaccattcttttcatagagcagttaggaaacagtctgtttgtcaattctgtaagtggatattctgacatcttgtggccttcgttggaaacgggatttcttcatattctgctagacagaagaattctcagaatcttccttgtgttgtgtgtattcaactcacagagttgaacgatccttcacacagagcagacttgaaacactctttttgtggaatttgcaagtggagatttcagccgctttgaggtccatggtagaaaaggaaatatcttcgtataaaaactagacagaatgattctcagaaactcctttgtgatgtgtgcgttcaactcacagagtttaacctttctgttcatagagctgttaggaaacactctgtttgtaaagtctgcaagtgggtattcagacctccttgaggccttcgttggaaacgggatttcttcatattttgctagacagaagaattctcagtaacttccttgtgttgtgtgtattcaactgacagagttgaactttcatttagagagagcagttttgaaacactgtttttgtggaatttgcaagtggagatttcaagcgctttggggccaaaggcagaaaaggaaatatcttcgtataaaaactagacagaatcattctcagaaactgctctgcgatgtgtgcgttcaactctcagagtttaacttttcttttcattcagcagtttggaaacactctgtttgaaaagtctgcacgtggatattttgaccacttagaggccttcgttggaaacgcgtttttttcctgtaaggctagacagaagaattcccagtaacttccttgtgttgtgtacattcaactcacagagttgaacgttcccttagacagagcagatttgaaacactctttttgtgaaattggcaagtggtgatttcagccgctttgaggtcaatggtagaaaaggaaatatcttcgtataaaaactagacagaatcattcccacaaactgcgttgtgatgtgttcgttcaactcacagagtttaacctttctgttcatagagcagttaggaaacactctgtttgtaaagtctgcaagtggatattcagacctccttgaggccttcgttggaaacggggtttcttcatattctgctagacagaagaattctcagtaacttccttgtgttgtgtgtattcaactcacagagttgaacgatcctttacacagagcagacttgaaacattctttttgtcgaatttgcaagtggagatttcagccgctttgaggtcaatggtagaataggaaatatcttcctatagaaactagacagataatgattctcagaaactcctttgtgatgtgtgcgttcaactcacagagtttaacctttcttttcatagagcagttaggaaacactctgtttgtaaagtctgcaagtggatattcagacctctttgaggccttcgttggaaacgggtttttttcatataaggctagacagaagaattcccagtaacttccttgtgttgtgtgtgttcaactctgtgagttgaacttccatttacacagagcagatttgaaacactctttttgtggaatttgcaagtggagatttcaagcgctttgaggccaaaggcagaaaaggaaatatcttcgtttcaaaactagacagactcattctcaagaaactgctctgcgatgtgtgcgttcaactctcagagtttaacttttcttttcattcagcagtttggaaacactctgtttgtaaaatctgcacgtggatattttgaccacttagaggccttcgttggaaacgggtttctttcctgtaaggctagacagaagaattcccagtaacttacttgtgttgtgtacattcaactcacagagttgaacgttcccttagacagagcagatttgaaacactctttttgtgcaattggcaagtggtgatttcagctgctttgaggtctatggtagaaaagggaatatcttcggtataaaaactagacagaatcattcccacaaactgcgttgtgatgtgttcgttcaactcacagagtttaacctttctgttcatagaacagttaggaaacactctgtttgtaaagtctgcaagtggatattcagacctccttgaggccttcgttggaaacgggatttcttcatattctgctagaccgaagagttctcagaatcttccttgtgttgtgtgtattcaactcacagaattgaacgatcctttacacagagcagacttgaaacactctttttgtggaatttgcaagtggagatttcagccgctttgaggtccatggtagaaaaggaaatatcttcgtataaaaactagacagaatgattctcagaaactcctttgtgatgtgtgcgttcaactcacagagtttaacctttcttttcatagagcagttaggaaacactctgtttctaaagtctgcaagtggatattcagacctctttgaggccttcgttggaaacgggtttttttcatataaggctagagagaagaattcccagtaacttccttgtgttgtgtgtgttcaactcacagagttgaactttcatttacacagagcagatttgaaacactctttttgtggaatttgcaagtggaaatttcaagcgctgtgaggccaaaggcagaaaaggaaatatcttcgtataaaaactagacagaatcattctcagaaactgctctgcgatgtgtgcgttcaactctcagagtttaactttgcttttcatacagcagtttggaaacactctgtttgtaaagtctgcacgtggataatttgaccacttagaggccttcgttggaaacgggtttttttcatgtaaggctagacagaagaattctcagtaacttccttgtgttgtgtgtattcaactcacagagttgcacgatcctttacacagagcagacttgaaacactctttttgtggaatttgcaagtggagatttcagccgctttgaggtcaatggtagaataggaaatatcttcctatagacactagacagaatgattctcagaaactgctttgtgatgtgtgtgttcaactcacagagtttaacatttcttttcatagagcagttaggaaacactctgtttgtaaagtctgcaagtggatattcagacctctttgaggccttcgttggaaacgggtttttttcatataaggctagacagaagaattctcagtaacttccttgtgttgtgtgtattcaactgacagagttgaactttcatttagagagagcagatttgaaacactgtttttgtggaatttgcaagtggaaatttcaagtgctttggggccaaaggcagaaaaagaaatatcttcgtataaaaacttgacagaatcactctcagaaactgctctgcgatgtgtgcgttcaactctcagagtttaacttttgttttcattcagcagtttggaaacactctgtttgtaaagtctgcacgtggatattttgaccactcagaggccttcgttggaaacgggtttttttcctgtaaggctagacagaaagaattcccagtaacttccttgtgttgtgtgcattcaactcacagagttgaacgttcccttagacagagcagatttgaaacactctatttgtgcaatttgaaagtgtagatttcaagcgctttaaggtcaacggcagaaaaggaaatatcttcgtttcaaaactagacagatgattctcagaaactcctttgtgatgtgtgcgttcaactcacagagtttaacctttcttttcatagagcagttaggaaacattctgtttgtaaagtctgcaagtggatattcagacatctttgaggttttcgtaggaaacgggatttcttcatattctgctagacagaagaattctcagaaacttccttgtgttgtgtttattcaactcacagagtcgaacgatcctttactcagagcagacttgaaacactccatttgtggaatttgcaagtggagatttcagccgctttgaggtcaatggtagaataggaaatatcttcctatggaaactagacagaatgattctcagaaactcctttgtgctgtgtgcgttcagctcacagagtttaaactttcttttcatagagcagttaggaaacactctgtttgtaaagtctgcaagtggatattcagacatctttgaggctttcgttggaaacgggatttcttcatattctgctagacagaagaattctcagaaacttccttgtgttgtgtgttttcaactcacagagttcaacgatccattacacagagtagacttgaaacactctttttgtggaattggcaagtggagatttcagccgctttgaggtcaatggtagaaaaggaaatatcttcgtataaaaactagacagagtgattctcagaaactcctttgtgatgtctgcgttcaactcacagagtttaacctttcttttcatagagcagttaggaaacactctggttgtaaagtctgcaagtgcatattcagacctccttgaggccttcgttggaaacgggatttcttcatattctgctatacagaagaattctcagaaacttccttgtgttttgtgtattcaactcacagagttgaacgatcctttacacagagcagacttgaaacactctttttgtggaatttgcaagtggagatttcagccgctttgaggtcaatggtagaaaaggaaatatcttcgtataaaaactagacagaatgattctcagaaactcctttgtgatgtgtgcgttcaactcacagagtttaacctttcttttcatagagcagttaggaaacactctgttggtaaagtctgcaaggggatattcagacctctttgaggccttctttggaaacgggatttcttcatattctgctagacagaagaattctcagtaacttccttgtgttgtgtgtattcaactcacagagttgaatgatcctttacacagagcagacttgaaacactctttttgtggaatttgcaagtggagatttcagccgctttgaggtcaatggtagaataggaaataacttcctatagaaactagacagaatgattctcagaaactcctttgtgatgtgtgcgttcaactcgcagagtttaacctttcttttcatagagcagttaggaaacactctggttgtaaagtctgcaagtggatattcagacctccttgaggccttcgttggaaacgggatttcttcatattatgctagacagaaagcaattctcagtaacttccttgtgttgtgtgtattcaactcacagagttgaacgatcctttacacagagcagacttgaaacactctttttgtggaatttgcaagtggagatttcagccgctttgaggtcaatggtagaaaaggaaatatcttcgtataaagactagacagaatgattctcagaaactcctttgtgatgtgtgcgttcaactcacacagtttaacctttcttttcatagagcagttgggaaacactctgtttgtaaagtctgcaagtggatattcagacctccttgaggccttcgttggaaacgggatttcttcatattctgctagacagaagaattctcagtaacttccttgtgttgtgtgtattcaactcacagagttgaacgatcctttacacagagcagacttgaaacactctttttgtggaatttgcaagtggagatttcagccgctttgtggtcaatggtagaaaaggaattatcttcgtataaagactagacagaatgattctcagaaaatcctttgtgatgtgtgcgttcaactaacagagtttaacctttcttttcatagagcagttaggaaacactctgtttgtaaagtctgcaagtggatattcagacatctttgaggctttcgttggaaacgggatttcttcatattctgctatacagaagaattcccagtaacttcctcgtgttgtgtgtgttcaactcacagagttgaactttcatttacacagagcagatttgaaacactctttttgtggaatttgcaagtggagatttcaagcgctttgaggccaaaggcagaaaaggaaatatcttcgtataaaaactagacagaatcattctcagaaactgctctgcgatgtgtgcgttcaactctcagagtttaacttttcttttcattcagaagtttggaaacactctgtttgtaaagtctgcacgtggataacttgaccacttagaggccttcgttggaaacgggtttttttcctgtaaggctagacagaagaattctcagtaaattccttgtgttgtgtgtattcaactcacagagttgaacgatcctttacacagagcagacttgaaacactctttttgtggaatttgcaagtggagatttcagccgctttgaggtcaatggtagaataggaaatatcttcctatagaaactagacagaatgattctcagaaacttctttgtgatgtgtgcgttcaactcacagagtttaacatttcttttcatggagcagttaggaaacactctgtttgtaaactctgcaagtggatattcagacctctttgaggccttcgttggaaacgggatttcttcatactgtgctagacagaacaattcccagtaacttccttgtgttgtgtgtgttcaactcacagagttgaactttcatttacacagagcagatttgaaacactctttttgtggaatttgcaagtggagatttcaagcgctttgaggccaaaggcagaaaaggaaatatcttcgtataaaaactagacagaatcattctaagaaactgctctgcgatgtgtgtgttcaactctcagagtttaacttttcttttccttcagcagtttggaaacactctgtttgtaaagtctgcacgtacataatttgaccacttagaggccttcgttggaaacgggtttttttcatgtaaggctagacagaagaattcccagtaacttccttgtgttgtgtgcattcaactcacagagttgaacgttcccttagacagagcagatttgaaacactctatttgtgcaatttgcaagtgtagaattcaagcgctttaaggtgaatggcagaaaaggaaatgtcttcgtttcaaaactagacagaatcattcccaaaaactgcgttgtgatgtgttcgttcaactcacagagtttaacctttctgttcatagagcagttaggaaacactctgtttgtaaagtccgtaagtggatattctgacatcttgtggccttcgttggaaacgggatttcttcatattctgctagacagaagaattctcagtaacttccttgtgttgtgtgtattcaactcacagagttgaacgatcctttacacagagcagacttgaaacactctttttgtggaatttgcaagtggagatttcagccgcgttgaggtcaacggtagaaaaggaaatatcttcgtataaatactagacagaatgattctcagaaactcctttgtgatgtttgcgttcaactgacagagtttaaactttcttttcatagagcagttaggaaacactctgtttgtaaagtctgcaagtggatattcagacctctttgaggccttcgttggaaacgggatttcttcatattctgctagacagaagaattcccagtaacttccttgggttgtgtgtgttcaactcacagagttgaactttcatttacacagagcagatttgaaacactctttttgtggaatttgcaggtggagatttcaagcgctttgaggccaaaggcagaaaaggaaatatcttcgtataaaaactagacagaatcattctcagaaactgctctgcgatgtgtgcgttcaactctcagagtttaacttttgttttcattcagcagtttggaaacactctgtttgtaaagtctgcacgtggataatttgaccacttagaggccttcgttgtaaacgggtttttttcctgtaaggctagacagaggaattcccagtaacttccttgtgttgtgtgcattcaactcacagagatgaacgttcccttagacagagcagatttgaaacactctatttgtgtaatttgcaagtgtagatttcaagcgctttaaggtcaatggcagaaaaggatatatctccgtttcaaaactagacagaatcattcccacaaactgcgttgtgatgtgttcgttcaactcacagagtttaacctttctgttcatagagcagttaggaaacactctgtttgtaaagtctgtaagtggatattctgacatcttctggccttcgttggaaacgggatttcttcatattctgctagacagaagaattctcagaatcttccttgtgttgtgtgtattcaactcacagagttgaacgatcctttacacagagcagacttgaaacactctttttgtggaatttgcaagtggagatttcagccgctttgaggtccacggtagaaaaggaaatatcttcgtataaaaactagacggaatgattctcagaaactcctttgtgatgtgtgcgttcaactcacagagtttaacctttcttttcatagagcagttaggaaacactctgtttgtaaagtctgcaagtggatattcagacctctttgaggctttcgttggaaacgggatttcttcatattctgctagacagaagaattctcagtaacttccttgtgttgtgtgtattcaactgacagagttgaactttcatttagagagagcagatttgaaacactgtttttgtggaatttgcacgtggagatttcaagcgctttggggccaaaggcagaaaaggaaatatcttcgtataaaaactagacagaatcattctcagaaactgctctgcgatgtgtgcgttcaactctcagagtttaacttttcttttcattcagaagtttggaaacactctgtttgtaaagtctgcacgtggataacttgaccacttagaggccttcgttggaaacgggtttttttcatgtaaggctagagagaagaattcccagtaacttccttgtgttgtgtacattcaactcacagagttgaacgttcccttagacagagcagatttgaaacactctttttgtgcaattggcaagtggcgatttcagcctctttgaggtcaatggtagaaaaggaaatatcttcgtataaaaactagacagaatgattctcagaaacttcattctgatgtgtgtgttcaactcacagagtttaacctttcttttcatagagcagttgggaaacagtctgtttgtaaattctgtaagtggatattctgacatcttgtggccttcgttggaaacgggatttcttcatattctgctagacagaagaattctcaagtaacttccttgtgttgtgtgtattcaactcacagagttgaacgatcctttacacagagcggacttgaaacactcgttttgtggaatttgcaagtggaggtttctgccgcgttgaggtcaatggtagaaaaggaaatatcttcgtataaaaactagacagaatgattctcagaaactcctttgtgatgtgtgcgttcaactcacacagtttaacctttcttttcatagagcagttaggaaacactctgtttgtaaagtctgcaagtggatatacagacctccttgaggccttcgttggaaacgggatttcttcatattatgctagacagaagaattctcagtaacttccttgtgttgtgtgtattcaactcacagagttgaaggatcctttacagagagcaggcttgaaacactctttttgtcgaatttgcaagtggagatttcagccgctttgaggtcaatggtagaataggaaatatcttctaatagaaactagacagaatgattctcagaaacttcattgtgatgtgtgcgttcaactcacagagtttaacctttcttttcatagagcagttaggaaacactctgtttgtaaactctgcaagtggatattcagacctctttgaggccttcgttggaaacgggatttctccatactttgctagacagaagaattctcagtaacttccttgtgttgtgtttattcaactcacagagttgaatgatcctttacacagagcagacttgaaacactctttttgtggaatttgcaagtggagatttcagccgctttgaggtcaacggtagaaaagtaaatatcttcgtataaagactagacagaatgattctcagaaactcctttgtgatgtgtgcgttcaactcacagagtttaacctttcttttcatagagcagttaggaaacactctgtttgtaaagtctgcaagtggatattcagacctccttgaggccttcattggaaacgggatttcttcatattatgctagacagaagaattctcagtaacttccttgtgttgtgtgtattcaactcacagagttgaacgatcctttacacagagcatacttgaaacactcttgttgtggaatttgcaagtggagatttcagccgatttgagttcaatggtagaataggaaatatcttcctatagaaactagacagaatgattctcagaaactcctttgtgatgtgtgcgtacaactcacagagttcaacctttcttttcatagagcagttgggaaacactctgtttgtaaagtctgcaagtggatattcagacttctttgaggccttcgttggaagcgggatttcttcatattatgctagacagaagatttcccagtaacttccttgtgttgtgtacattcaactcacagagttgaacgttcccttagacagagcagatttgaaacactctttttgtgcaattggcaaatggagatttcaagcgctttaaggtcaatggcagaaaagaaaatatcttcgtttcaaaactagacagaatcattcccacaaactgcgttgtgatgtgttcgttcaactcacagagtttaacctttctgttcatagagcagttaggaaacactctgtttgtaaagtctgtaagtggatattctgacattttgtgtccttcgttggaaatgggatttcttcatattctgctagacagaagaattctcagtaacttccttgtgttgtgtgtattcaactcacagagttcaacgatgctttacacagagtagacttgaaacacactttttgttgaatttgcaagtggagatttcagccgctttgaggtcaatggtagaataggaaatatcttcgtataaaaagtagacagaatgattctcagaaactcctttgtgatgtgtgtgttcaactcacagagtttaacctttcttttcatagagcagttaggaaacactctgtttgtaaagtctgcaagtggatattcagacctcttgaggccttcgttggaaacgggtttttttcatataaggctagacagaagaattcccagtaacttccttgtgttgtgtgtgttcaactcacagagttgaactttcatttacacagagcagatttgaaacactctttttgtggaatttgcaaatggagatttcaagcgctttgaggccaaaggcagaaaaggaaatatcttcgtataaaacctagacagaatcattctcagaaactgctctgcgatgtgtgcgttcaactctcagagtttaacttttcttttcattcagcagtttggaaacactctgtttgtaaagtctgcacgtggataatttgacctcttagaggccttcgttggaaacgggtttttttcctgtaaggctagacagaagaattctcagtaacttccttgtgttgtgtgtattcaactcacagagttgaacgatcctttacacagagcagacttgtaagactctttttgtggaatttgcaagtggagatttcagccgctttgaagtcaaaggtagaaaaggaaatatcttcctataaaaactagacagaatgattctcagaaacttctttgtgatgtgtgcgttcaactcacagagtttaacctttcttttcatagagcagttaggaaacactctgtttgtaaactctgcaagtggatattcagacctccttgaggccttcgttggaaacgggatttcttcatactgtgctagacagaagaattctcagtaacttccttgtgttgtgtgtattcaactgacagagttgaactttcatttagagagagcagatttgaaacactgtttttgtggaatttgcaagtggagatttcaagcgctttggggccaaaggaagaaaaggaaatatcttcgtataaaaactagacagaatcattctcagaaaatcctctgtgatgtgtgcgttcaactctcagagtttaacttttcttttcattcagcagtttggaaacactctgtttgtaaagtctgcacgtggatattttgaccacttagaggccttcgttggaaacgggtttttttcatataaggctagacagaagaattcccagtaacttccttgtgttgtgtgcattcaactcacagagttgaacgttcccttagacagagccgatttgaaacactctatttgtgcaatttgcaagtgtagatttcaagcgctttaaggtcaatggcagaaaaggaaatatcttcgtttcaaaactagacagaatcattcccacaaactgcgttgtgatgtgttcgttcaactcacagagtttaacctttctgttcatagagcagttaggaaacactctgtttgtaaagtctgtaagtggatattctgacatcttgtggccttcgttggaaacgggatttcttcatattctgctggacagaggaattctcaggaacttccttgtgttgtgtgtattcaactcacagagttgaacgatcctttacacagagcagacttgaaacacactttttgtggaatttgcaagtggagatttcagccgctttgagttcaaaggtagaataggaaatatcttcctatagaaagtacacagaatgattctcagaaactgctttgtgatgtgtgcgttcaactcacagagttcaacctttcttttcatagagcagttgggaaacactctgtttgtaaagtctgcaagtggatattcagacttctttgaggccttcgttggaagcgggatttcttcatattctgctagacagaataattctcagtaacttccttgtgttgtgtgtattcaactcacagagttgaacgatcctttacagagagcagacttgaaacactctttttgtgtaatttgcaagtggagatttcagccgctttgaggtcaatggtagaataggaaatatcttcctatagaaactagacagaatgattctcagaaactcctttgtgatgtgtgcgtgcaactcacagagtttaacctttcttttcatagagaagttaggaaacactctgtttgtaaagtctgcaagtggatattcagacatccttgaggctttcgttggaaacgggatttcttcatattctgctagaaagaagaattctcattaacttccttgtgttgtgtgtattcaactcacagagttgaaggatcctttacacagagcggacttgaaacactctttttgtggaatttgcaagtggagatttcagccgcgttgaggtcaatggtagaaaaggaaatctcttcgtataaaaagtagacagaatgattctcagaaactcctttgtgatgtgtgtgttcaacccacagagtttaacctttcttttcatagagcagttaggaaacactctgtttgtaaagtctgcaagtggatattccgatctctttgaggccttcgttggaaacgggtttttttcatataaggctagacagaaggattcccagtaacttcccttgtgttgtgtgtgttcaactcacagagttgaactttcatatacaaagagcagatttgaaacactctttttgtggaatttgcaagtggagatttcaagcgctttgaggccaaaggcagaaaaggaaatatcttcgtataaaaactagacagaatcattctcagaaactgctgtgtgatgtgtgcgttcaactctcagagtttaacttttcttttcattcagcggtttggaaacactctgtttgtaaagtctgcacgtggatattttgaccacttagaggccttcgttggaaacggttttttttcatgtaaggctagacagaagaattcccagtaacttccttgtgttgtgtacattcaactcacagagttgaacgttcccttagacagagcagatttgaaacactctttttgtgcaattggcaagtggtgatttcagccgctttgaggtcaatggtagaaaaggaaatatcttcgtataataactagacagaatcattcccacaaactgcgttgtgatgtgttcgttcaactcacagagtttaacctttctgttcatagagcagttaggaaacactctgtttgtaaagtctggaagtggatattcagacctccttgaggccttcgttggaaacgggatttcttcatattctgctagacagaagaattctcagtaacttccttgtgttgtgtgtattcaactcacagagttgaacgatcctttacacagagcagacttgaaacactctttttgtggaatttgcaagtggatatttcagccgctttgaggtcaatggtagaataggaaatatcttcctatagaaactagacagaatgattctcagaaactcctttgtgatgtgtgcgttcaactcacacagtttaacctttcttttcatagagcagttaggaaacactctgtttgtaaagtctgcaagtggatattcagacctctttgaggcattcgttggaaacgggatttctacatattatgctagacagaagaattcccagtaacttccttgtgttgtgtgtgttcgactcacagagttgaactttcatttacacagagcagatttgaaacactctttttgtggaatttgcaagtggagatttcaagcactttgaggccaaaggcagaaaaggaaatatcttcgtttcaaaactagacagaattattctcagaaactcctttgtgatgtgtgcgttcaactcacagagtttaacctttcttttcatagagcagttaggaaacactctgtttgtaaagactgcaagtggatattcagacctctttgaggccttcgttggaaacgggtttttttcctgtaaggctagacagaagaattcccagtaacttccttgtgttgtgtacattcaactcacagagttgaacgttcccttagacagagcagatttgaaacactctttttgtgcaattggcaagtggagatttcaagcgctttacggtcaatggcagaaaaggaaatatcttcgtttcaaaacaagacagaatcattcccacaaactgcgttgtgatgtgttcgttcaactcacagagtttaacctttctgttcatagagcagttaggaaacactctgtttgtaaagtctgcaagtggatattcagacctctttgaggccttcgttggaaacgggatttcttcatattctgctagacagaagaattctcagtaacttccttgtgttgtgtgtattcaactcacagagttgaacaatcctttacacagagcagagttgaaacactctttttgtggaatttgcaagtggagatttcagctgctttgaggtcaatggtagaataggaaatatcttcctatagaaactagacagaatgattctcagaaactcctttgtgatgtgtgcgttcaaatcacagagtttaacctttctgttcatagagcagttaggaaacactctgtttgtaaagtctgccagtggatattcagacctccttgattccttcgttggaaatgggatttcttcatattctgctagacagaagaattctcagtaacttctttgtgttgtgtgtattcaactcacagagttgaacgatcctttacacagagcagacatgaaacactctttttgtggaatttgcaagtggagatttctgccgctttgaggtcaatggtagaataggaaatatcttcctatagaaaatagacagaatgattctcagaaacttctttgtgatgtgtacgttcaactcacaggagtttaacctttcttttcttagagcagttaggaaacactctgtttgtaaagtctgcaagtggatattcagacctctttgaggccttcgttggaaacgggtttttttcatataaggctagacagaagaattctcagtaacttccttgtgttgtgtgtattcaactcacagatttcaacgatcctttacacagagcagacttgaaacactctttttctggaatttgcaagtggagatttcagccgctttgaggtcaatggtagaataggaaatatcttcctatagaaactagacagaatgattctcagaaactcctttgtgatgtgtgcgttcaactcacagagtttaacgtttcttttcacagagcagttaggaaacactctgtttgtaatgtctgcaagtggatattcagaaccctttgaggccttcgttggaaacgggatttcttcatattatgctagacagaataattctcagtaacttccttcttttgtgtgtattcaactcacagagttgaacgatcctttacagagagcagacttgaaacactctttttgtggaatttgcaagtggagatttcaggcgctttgaggtcaatggtagaataggaaatatcttcctatagaaactagacagaatgattctcagaaactcctttgtgatgtgtgcgttcaactcacagagtttaagctttcttttcatagagcagttaggaaacactctgtttgtaaagtctgcaagtggctattcagacccctttgaggccttctttcgaaacgggatttcttcatattatgctagacagaagaattctcagtaacttccttgtgttgtgtgttttcaactgacagagttaaactttcatttagagagagcagatttgaaacactgtttttgtggaatttgcaagtggagatttcaagcgctttgtggccaaaggtagaaaaggaaatatcttcgtataaaaactagacagaatcattctcagaaactgctctgcgatgtgtgcgttcaactctcagagtttaacttttcttttcatagagcagttaggaaacactctggtttgtaaagtctgcatgtggataatttgaccacttagaggtctttgttggaaacgggttttttcatgtaaggctagacagaagaattcccagtaacttccttgtgttgtgtgcattcaactcacagagttgaacgttcccttagacagagcagatttgaaacactctatttgtgcaatttgcaagtgtagatttcaagcgctttaaggtcaatggcagaaaaggaaatttcttcgttttaaaactagacagaatgattctcagaaactcctttgtgatgtgtgcgttcaactcacagagtttaacgtttcttttcatagagcagttaggaaacactctgtttgtaaagtctgcaaggggatattcagacctctctgaggccttcgttggaaacgggatttcttcatattctgcttcacagaagaattctcagtaacttcccttgtgttgtgtgtattcaactcacagagttgaacgatcctttacacagagcagacttgaaacactctttttgtggaatttgcaagtggagatttcagccgctttgaggtcaatggttgaataggaaatatcttccaatagaaactagacagaatgattctcagaaactcctttgtgatgtgtgcgttcaactcacagagtttaacctttcttttcatagagtagttaggaaacactctgtttgtaaagtctgcaagtggatattcagacctctttgagaccttcgttggaaacgggtttttttcatataaggctagacagaagaattctcagtaacttccttgtgttgtgtgtattcaactcacagagttgaacgatcctttacacagagcagacttgaaacattctttttgtggaatttgcaagtggagatttcagccgctttgaggtcaatggtagaaaagtaaatatcttcctataaagactagacagaatgattctcagaaacttctttgtgatgtttgcgttcaactcacagagtttaacctttcttttcatagagcagttaggaaacactctgtttgtaaagtctgcaagtggatattcagacctccttgaggccttcgttggaagcgggatttcttcatgttctggtagacagaagaattctcagtaacatctttgtgttgtgtgtattcaactcacagagtggaacgatcctttacagagagcagacttgaaacactctttttgtggaatttgcaagtggagatttcagccgctttgaggtcaatggtagaataggaaatatcttcctatagaaactagacagaatgattctcagaaactcctttgtgatgcgtgcgttcaactcacagagtttaacctttcttttcatagagcagttaggaaacactctgtttgtaaagtctgcaagtggatattcagacctctttgaggccttcgttggaaacgggatttcttcatattatgctagacagaagaattctcagtaacttccttgtgttgtgtgtattcaactgacagagttgaactttcatttagagagagcagatttgaaacactgtttttgtggcatttgcaagtggagatttcaagcgctttggggccaaaggcagaaaacgaaatatcttcgtataaaaactagacagaatcattctcagaaactgctctgcgatgtgtgcgttcaactctcagagtttaacttttcttttcattcagcagtttggaatcactctgtttgtaaagtctgcacgtggatattttgaccacttagaggccttcgttggaaacgggtttttttcctgtaaggctagacagaagaattctcagtaacttccttgtgttgtgtgtattcaactcacagagttgaacgatcctttacacagagcagacttgtaacactcattttgtggaatttgcaagtggagatttcagccactttgaagtcaaaggtagaaaaggaaataacttcctataaaaactagacagaatcattcccacaaactgcgttgtgatgtgttcgttcaactcacagagtttaacctttctgttcatagagcagttaggaaacactctgtttgtaaagtctgtaagtggatattctgacatcttgtggccttctttggaaacgggatttcttcatattctgctagacagaataattctcagtaacttctttgtgttgtgtgtattcaactcacagagttgaaggatcctttacagagagcaggcttgaaacactctttttgtcgaatttgcaagtggagatttcagccgctttgaggtcaatggttgaataggaaatagcttcttatagaaactagacagaatgattctcagaaactcctttgtgatgtgtgcgttcaactcacagagtttaacctttcttttcatagcgcagttgggaaacactctgtttgtaaagtctgcaagtggatattcagacatccttgaggctttcgttggaaacgggatttcttcatattctgctagaaagaagaattctcagtaacttccttgtgttgtgtgtattcaactcacagagttgaacgatcctttacacagagcagacttgaaacactctttttgtggaatttacaagtggagatttcagccgatttgaggtcaatggtagaaaaggaaatatcttcctatagaaactagacagaatgattctcagaaactcctttgtgatgtgtgcgttcaactcacagagttcaacctttcttttcatagagcagttgggaaacactctgtttgtaaagtctgcaagtggatattcagacctccttgaggccttcgttggcaacgggatttcttcatattctgctagacagaagaattctcagtaacttccttgtgttgtgtgtattcaactcacagagttgaacgatcctttacacagagccgacttgaaacactctttttgtggaatttgcaagtggagatttcagccgctttgagttcaatggtagaataggaaatatcttcctatagaaactagacagaaagattctcagaaactccttcgtgatgtgtgcgttcaactcacagagtttaacctttcttttcagagagcagttaggaaacactctgtttgtaaagtctgcaagtggatattcagacctctttgaggccttcgttggaaacgggatttcttcatattctgctagacagaagaattcccagtaacttccttgtgttgtgtgtgttcaactcacagagttgaactttcatttacacagagcagatttgaaacactctttttgtggaatttgcaagtggagatttcaagcgatttgaggccaaaggcagaaaaggaaatatcttcgtataaaaagtagacagaatcattctcagaaactgctctgagatgtgtgcattcaactctcagagtttaacttttcttttcattcagcagtttggaaacactctgtttgtaaagtctgcacgtggataatttgaccacttagaggccttcgttggaaacgggtttttttcatgtaaggctagacagaagaattcccagtaacttccttgtgttgtgcgcattcaactcacagagttgaacgttcccttagacagagcagatttgaaacactctatttgtgcaatttccaagtgtagatttcaagcgctttaaggtcaacggcagaaaaggaaatatccttcgtttcaaaactagacagaatcattcccacaaactgcgttgtgatgtgttcgttcaactcacagtagtttaacctttcttttcatagagcagttaggaaacagtctgtttgtcaattctgtaagtggatattctgacatcttgtggccttcgttggaaacgggatttcttcatattctcctagacagaagaattctcagtaacttccttgtgttgtgtgtattcaactcacagagttgaaagatcctttacacagagcagacttgaaacactctttttgtggaatttgcaagtggagatttcagccgctttgatgtcactggtagaaaaggaaatatcttcgtataaagactagacagaatgattctcagaaactcctttgtgatgtgtgcgttcaactcacagagtttaacctttcttttcatagagcagttaggaaacactctgtttgtaaagtctgcaagtggatattcagacctctttgaggaaatcgttggaaacgggatttcttcacattctgctagacagaagaattcccagtaacttccttgtgttgtgtgtgttcaactcacagagttgaactttcatttacacagagcagatttgaaacactctttttgtggaatttgtaagtggagatttcaagcgctttgaggccaaaggcagaaaaggaaatatcttcgtttcaaaactagacagaatcattctcagaaactgctgcgtgatgtgtgctttcaactctcagagtttaacttttcttttcattcagcggtttggaaacactctgtttgtaaagtctgcacgtggatattttgaccacttagaggccttcgttggaaacgggtttttttcatgtaagggtagacagaataattctcagtaacttccttgtgttgtgtgtattctactcacagagttgaacgatcctttacacagagcagacttgaaacactctttttgtggaatttgcaagtggatatttcagccgctttgaggtcaatggtagaataggaaatatcttcctatagaaactagaccgaatgattctcagaaactcctttgtgatgtgtgcgttcaactcacaagagtttaacctttcttttcttagagcagttaggaaacactctgtttgtaaagtctgcaagtggatattcagacctccttgaggccttcgttggaaacgggtttttttcatataaggctagacagaagaattcccagtaacttccttgtgctgtgtgtgttcaactcacagagttgaactttcatttacacagagcagatttgaaacactctttttgtggaatttgcaagtggagatttcaagcgctttgaggccaaaggcagaaaaggaaatatcttcgtttcaaaactagacagaatcattctcagaaaatcctctgtgatgtgtgcgttcaactctcagagtttaacttttcttttcattcagcagtttggaaacactctgtttgtaaagtctgcacgtggatattttgaccacttacaggccttcgttggaaacgggttttttcatgtaagggtagacagaagaattcccaggaacttccttgtgttgtgtacattcaactcacagagttgaacgttcccttagacagagcagatttgaaacactctttttgtgcaattggcaagtggtgatttcagccgctttgaggtcaatggtagaaaaggaaatatcttcgtagaaaaactagacagaatgattctcagaaactcctttgtgatgtgtgcgttcaactcacagagtttaacctttcttttcatagagcagttaggaaacactctgtttgtaaagtctgcaagtggatattcagacctccttgaggccttcgttggaaacgggatttcttcatattctgctagatagaagaattctcagtaacttccttgtgttgtgtgtattcaacttacagagttgaacgattctttacacagagcagacttgaaacactctttttgtggaatttgcaagtggagatttcagccgctttgaggtcaatggtagaaaaggaaatatcttcgtataaagactagacagaatgattctcagaaactcctttgtgctgtgtgcgttcaactcacagagtttaacctttcttttcatagaacagatagtaaacactctgtttgtaaagtctgcaagtggatattcagacatctttgaggctttcgttggaaacgggatttcttcatattctgctagacagaataattctcagtaacttccttgtgttgtgtgtattcaactcacagagttgaacgatcctttacacagagcagacttgaaacactctttttgtggaatttgcaagtggagatttcagccgcgttgaggtcaatggtagaataggaaatatcttcctatagaaactagacagaatcattctcagaaactgctgcgtgatgtgtgcgttcaactctcagagtttaacttttcttttcattcagcggtttggaaacactctgtttgtaaagtctgcacagtggatattttgaccacttagaggccttcgttggaaacgggtttttttcaagtaaggctagacagaagaattcccagtaacttccttgtgttgtgtacattcaactcacagagttgaacgttcccttagacagagcagatttgaaacactctttttgcgcaattggcaagtggagatttcaagcgctttaagatcaatggcagaaaaggaaatatcttcgtttcaaaactagacagaatgattctcagaaactcctttgtgatgtgttcgttcaactcacagagtttaacctttcttttcatagagcagttaggaaacactctgtttgtaaagtctgcaagtggatattcagacatccttgaggctttcgttggaaacgggatttcttcatattctgctagaaagaagaattctcagtaacttccttgtgttgtgtgtattcagctcacagagttgaacgatcctttacacagagcagacttgaaacactctttttgtggaatttgcaagtggagatttcagccgctttgaggtcaatggtagaataggaaatatcttcctatagaaactagacagaatgattctcagaaaaacctttgtgatgtgtgtgttcaactcacagagtttaacctttcttttcatagagcagttaggaaacactctgtttttaaagtctgcaagtggatattgagacctctttcaggccttcgttggaaacgggatttcttcatattatgctagacagaagaattctcagtaacttccttgcgttgtgtgtattcaactgacagagttgaactttcatttagagagagcagatttgaaacactgtttttgtcgaatttccaatggagatttcaagcgctttggggccaaaggcagaaaaggaaatatcttcgtataaaaactagacagaatcattctcagaaactgctgcgtgatgtgtgcgttcaactcctcagagtttaacttttcttttcattcagcggtttggaaacactctgtttgtaaagtctgcacgtggaaattttgaccacttagaggccttcgttggaaacgggtttttttcatgtaaggctagacagaagaattcccagtaacttccttgtgttgtgtgcattcaactcacagagttgaacgttcccttagacagagcagatttgaaacactctatttgtgcaatttgcaagtgtagttttcaagctctttaaggtcaacggcagaaaaggaaatatcttcgtttcaaaactagacagaatcattcccacaaactgcgatgtgatgtgttcgttaaactcacagagtttaacctttctgttcatagagcagttaggaaacactctgtttggaaagtctgtaagtggatattctgacatcttgtggccttcgttggaaacgggatttcttcatattctgctagacagaagaattctcagaatcttccttgtgttgtgtgtattcaactcaaagagttgaacgatcctttacacagagcagacttgaaacactctttttgtggaatttgcaagtggagatttcacccgctttgaggtccatggtagaaaaggaaatatctttgtataaaaactagacagaatgattctgagaaactcctttgtgatgtgtgcgttcaactcacagagtttaacctttcttttcatagagcagttaggaaacactctgtttgtaaagtctgcaagtggatattcagacctctttgaggccttcgttggaaacgggatttcatcatattctgctagacagaagaattctcattaacttccttgtgttgtgtgtattcaactcacagagttgaacgatcctttacacagagcggacttgaaacactctttttgtgtaatttgcaagtggagatttcagccgcgttgaggtcaatggtagaaaaggagatctcttcgtataaaaactagacagaatgattctcagaaactcctttgagatgtgtgcgctcaactcacagagtttaacctttctttttatagagcagttaggaaacactctgtttgtaaagtctgcaagtggatattcagacctctttgaggccttcgttggaaacgggtttttttcatataaggctagacagaagaattcccagtaacttccttgtgttgtgtgcattcaactcacagagatgaacgttcgcttagacagagcagatttgaaacactctatttgtgcaatttgcaagtgtagatttcaagcgctttaaggtcaatggcagaaaaggaaatatcttcgtttcaaaactagacagaatcattcccacaaactgcgttgtgatgtattcgttcaactcacagagtttaacctttctgttcatagagcagttaggaaacactctgtttgtaaagtctgtaagtggatattctgacatcttgtggcccttcgttggaaacgggatttcttcatattctgctagacagaagaattcccagtaacttccttgtgttgtgtgtattcaactcacagagttgaacgatcctttacacagagcagacttgaaacactctttttgtggaatttgcaagtggagatttcagccgctttgaggtcaatggtagaaaaggaaatatcttcgtagaaaaactagacagaatgattctcagaaactcctttgtgatgtgtgtgttcaactcacagagtttaacctttcttttcatagggcagttaggaaacactctgtttgtaaagtctgcaagtggatattcagacctcctagaggccttcgttggaaacgggatttcttcatattctgctacacagaagaattcccagtaacttccttgtgttgtgtgtgttcaactcacagagttgaactttcatttacccagagcagatttgaaacactcttttagtggaatttgcaagtggagatttcaagcgctttgaggccaaaggcagaaaaggaaatatcttcgtttcaaaattagacagaatcattctcagaaactgctgcgtgatgtgtgcgttcaactctcagagtttaacttttcttttcattcagcggtttggaaacactctgtttgtaaagtctgcacgtggttattttgaccacttagacgccttcgttggaaacgggtttttttcatgtaaggctagacagaagaattcccagtaacttccttgtgttgtgtgcattcaactcacagagttgaacgttccgtagacagagcagatttgaaacactctatttgtgcaatttgcaagtgtagatttcaagcgctttaaggtcaatggcagaaaaggaaatatcttcgtttcaaaactagacagaatgattctcagaaaatcttttgtgatgcgtgcgttcaactcacagagtttaacttttcttctcatagagcagttaggaaacactctgtttgtaaagtctgcaagtggatattcagacctctttgaggccttcgttggaaacgggatttcttcatattatgctagacagaataattctcagtaacttccttgtgttgtgtgtattcaactcacagagttgaaggatcctttacagagagcaggcttgaaacactctttttgtcgaatttgcaagtggagaattcagccgctttgaggtcaatggtagaataggaaatatcttcttatagaaactagacagaatgattctcagaaactcctttgtgatgtgtgcgttcaacacacagagttcaaactttcttttcatagagcagttgggaaaaactctgtttgtaaagtctgcaagtggatattcagacttctttgaggccttcgttggaagcgggatttcttcatattctgctagacagaagaattctcagtaacctccttgtgttgcgtgcattcaactgacagggttgaaatttcatttagacagagcagatttgaaacactgtttttgtggaatttgcaagtggagatgtcaagcgctttggggccaaaggcagaaaaggaaatatcttcgtataaaaactagacagaatcattctcagaaactgctctgcgatgtgtgcgttcaactctcagagtttaacttttctttccattcagcagtttggaaacactctgtttgtaaagtctgcacgtggataatttgactacttagaggccttcgttggaaacgggtttttttcctgtaaggctagagagaagaattcccagtaactttcttgtgttgtgtacattcaactcacagaattgaacgttcccttagacagagcagatttgaaacactctgtttgtgcaattggcaagtggtgatttcatccgctttgaggtcaatggtagaaaaggaaatatcttcgtataaaaactagacagaatctttcccacaaactgccttgtgatgtgttcgttcaactcacagagtttaacctttctgttcatagagcagttaggaaacactctgtttgtaaagtctgcaagtggatattcagacctccttgaggccttcgttggaaacgggatttcttcatattctgctagacagaataattctcagtaacttccttgtgttgtgtgttttcaactcacagagttgaacgatcctttacacagagcagacttgaaacactctttttgtggaatttgcaagtggagatttcagccgctttgaggtcaatggtagaataggaaatatcttcctatagaaactagacagaatgattctcagaaactcctttgtgatgtgtgcgttcaactcacagagtttaacctttcttttcatagagcagttaggaaacactctgtttttatagtctgcaagtggatattcagacatctttgaggccttcgttggaaacgtgatttcttcatattctgctatacagaagaattctcagaaacttccttgtgttgtgtgttttcaactcacagagttgaacgatgctttacacagagtagacttgaaacactctttttgtgtaatttgcaagtagagatttcagccgctttgaggtcaatggtagaaaaggaaatatcttcgtataaaaactagacagaatcattctcagaaactgctgcgtgatgtgtgcgttcaactctcagagtttaacttttcttttcattcagcggtttggaaacactctgtttgtaaagtctgcacgtggatattttgaccacttagaggccttcgttggaaacgggttttttttcatgtaaggctagacagaagaattcccagtaacttccttgtgttgtgtgcattcaactcacagagttgaacgttcccttagacagagcagatttgaaacactctatttgtgcaatttgaaagtgtagatttcaagcgctttaaggtcaacggcagaaaaggaaatatcttcgtttcaaaactagacagaatcattcccacaaactgcgttgtgatgtgttcgttcaactcacagagttttacctttctgttcatagagcagttaggaaacactctgtttgtaaagtctgcaagtggatattcagacctcctagaggccttcgttggaaacgggatttcttcatattctgctagacagaagaattctcagtaacttccttgtgttgtgtgtattcaactcacagagttgaacgatcctttacacagagcagacttgaaacactctttttgtggaatttgcaagtggagatttcagccgctttgaggtcaatggtagaataggaaatatcttcttatagaaactagacagaatgattctcagaaactcctttgtgatgtgtgcgttcaactcacagagtttaacctttcttttcatagagcagttaggaaacactccgtttgtaaagtctgcaagtggatattcagacctctttgaggccttcgttggaaacgggtttttttcatataaggctagacagaagaattctcagtaacttccttgtgttgtgtgtattcaactcacagagttgaacgatcttttacacagaccagacttgaaacactctttttgtggaatttgcaagtggagatttcagccgctttgaggtcaatggtagaataggaaatatcttcctatagaaactagacagaatcattctcagaaactcctttgtgatgtgtgcgttcaactcacagagtttaacctttcttttcatagagcacttaggaaacactctgtttgtaaagtctgcaagtggatattcagacctccttgaggccttcgttggaaacgggatttcttcatattatgctagacagaagaattctcagtaacttccttgtgttgtgtgtattcaactgacagagttgaactttcatttagagagagcagatttgaaacactgtttttgtggaatttgtaagtggaaatttcaagcgctttggggccaaaggcagaaaaggaaatatcttcgtataaaaactagacagaatcattctcagaaactgctctgcgatgtgtgcgttcaactctcagagttaaacttttcttttcattcagcagtttggaaacactctgtttgtaaagtctgcacgtggataatttgaccacttagaggccttcgttggaaacggttttttttaatgtaaggctagacagaagaattcccagtaacttccttgtgttgtgtgcattcaactcacagagttgaacgttcccttagacagagcagatttgaaacactctatttgtgcaatttgcaagtgtagatttcaagcgctttaaggtcaatggcagaaaaggaaatatcttcgtttcaatactagacagaatgattctcagaaactcctttgtgatgtgtgcgttcaagtcgcagagtttaacctttcttttcatagagcagttaggaaacactctgtttgtaaagtgtgcaagtggatattcagacctctttgaggccttcgttggaaacgggatttcttcatattctgctagacagaagaattctcagtaacttccttgtgttgtgtgtattcaactcacagagttcaacgatcctttacacagagcagacttgaaaaaatctttttgtggaatttgcaagtggagatttcagccgctttgaggtcaatggtagaaaaggaaatatcttcgtataaaaactagacagaatgattctcagaaactcctttgtgatgtgtgcgttcaactcacagagtttcacctttcttttcatagagcagttaggaaacactctgtttgtaaagtctgcaagtggatattcagacctccttgagggcttcgttggaaacgggatttcttcatattctgctagacagaagaattcccagtaacttccttgtgttgtgtgtgttcaactcacagagttgaactttcatttacacagagcagatttgaaacactctttttgtggaatttgcaagtggagatttcaagcgctgtgaggccaaaggcagaaaaggaaatatcttcgtatagaaactagacagaatcattctcagaaactgctgcgtgatgtgtgcgttcaactcacagagtttaacttttcttttcattcagcggtttggaaacactctgtttgtaatgtctgcacgtggatattttgaccacttagaggccttcgttggaaacgggattttttcatgtaaggctagacagaagaattcccagtaacttccttgtgttgtgtacattcaactcacagagttgaacgttcccttagacagagcagatttgaaacactctttttgtgcaattggcaagtggagatttcaagcgctttaaggtcaatggcagaaaaggaaatatcttcgtttcaaaactagagagaatcattcccacaaactgcgttgtgatgtgttcgttcaactcacagagtttaacctttctgttcataaagcagttaggaaacactctgtttgtaaagtctgtaagtggatattctgacatcttgtggccttcgttggaaacgggatttcttcatattctgctagacagaagaattctcagtaacttccttgtgttgtgtgtattcaactcacagatttgaacgatcctttacacagagcagtcttgaaacactctttttgtggaatttgcaagtggagatttcagccgctttgaggtcaatagtagaaaaggaaatatcttcgtagaaaaactagacagaatgattctcagaaaatcttttgtgatgtgtgcgttcaactcacagagtttaacttttcttctcatagagcagttaggaaacactctgtttgtaaagtctgcaagtggatattcagacctctttgaggccttcggtggaaacgggatttcttcatattatgctagacagaagaattctcagtaacttccttgtgttgtgtgtgttcaactcacagagttgaactttcatttacacagagcagactttaaacactctttttgtggaatttgcaagtggagatttcaagcgctttgaggccaaaggcagaaaaggaaatatcttcgtataaaaactagacagaatcattctcataaactgctgcgtgatgtgtgccttcaactctcagagtttaacttttcttttcattcagcggtttggaaacactctgtttgtaaagtctgcacgtggatatttttgaccacttagaggccttcgttggaaacgggtttttttcatgtaaggctagacggaagaattcccagtaacttccttgtgttgtgtgcatttaactcacagagttgaacgttcccttagacagagcagatttgaaacactctatttgtgcaatttgcaagtgtagatttcaagcgctttaaggtcaatggcagaaaaggaaatatcttcgtttcaaaactagacagataatcattcccacaaactgcgttgtgatgtgttcgttcaactcacagagtttaacctttcttttcatagagcagttaggaaacagtctgtttgtaaattctgtaagtggatattctgacatcttgtggccttcgttggaaacgggatttcttcatattctgctagacagaagaattctcagtaacttcgttgtgttgtgtgtattcaactcacagagttgaacgatcctttacacagagcagacttgaaacactctttttgtggaatttgcaagtggagatttcagccgctttgaggtcaatggtagaataggaaatatcttcctatagaaactagacagaatgattctcagaaactgctttgtgatgtatgcgttcaactcacagagttcaaccattctgttcatagagcagttaggaaacactctgtttgtaaagtctgcaagtggatattcagacctctttgaggccttcgttggaaacgggatttcttcatattctgctagacagaagaattctcagtaacttccttgtgttgtgtgtattcaactgacagagttgaactttcatttagagagagcagatttgaaacactgtttttgtggaatttgcaattggagatttcaagcgctttggggccaagggcagaaaaggaaatatcttcgtataaaaactagacagaatcattctcagaaactgctgcgtgatgtgtgcgttcaattctgagagtttaacttttcttttcattcagcggtttggaaacactctgtttgtaaagtctgcacgtggaaattttgaccacttagaggccttcgttggaaacgggtttttttcatgtaaggctagacagaagaattcccagtaacttccttgtgttgtgtgcattcaactcacagagttgaacgttccctaagacagagcagatttgaaacactctatttgtgcaatttgcaagtgtagatttcaagcgctttaaggtcaacggcagaaaaggaaatatcttcgtttcaaaactagacagaatcattcccacaaactgcgttgtgatgtgtgtgttcaactcacagagtttcacctttcttttcatagagcagttaggaaacagtctgtttgtcaattctgtaagtggatattctgacatcttgtggccttcgttggaaacgggatttcttcatattctgctagacagaagaattctcagtaacttccttgtgttgtgtgtattcaactcacagagttgaacgatcctttacacagagtagacttgaaacactctttttgtggaatttgcaagtggagatttcagccgctttgaggtcaatggtagaaaaggaaatatcttcgtataaaaactagacagaatgattctcagaaacttctttgtgatgtgtgcgttcaactcatagagtttaacctttcttttcatagagcagttaggaaacactcggtttgtaaactctgcaagtggatattcagacctctttgaggccttcgttggaaacgggatttcttcatactgtgctagacagaagaattctcagtaacttcccttgtgttgtgtgtattcaactcacagagttgaacgatcctttacacagagcggacttgaaacactctttttgtgaaatttgcaagtggagatttcagccgcgttgaggtcaatggtagaaaaggaaatatcttcgtataaaaactagacagaatcattctcagaaactgctgcgtgatgtgtgcgttcaactctcagagtttaacttttcttttcattcagcggtttggaaacactctgtttgtaaagtctgcacgtggatattttgaccacttagaggccttcgttggaaacgggtttttttcatgtacggctagacagaagaattcccagtaacttccttgttttgtgtacattcaactcacagagttgaacgttcccttagatagagcagatttgaaacactctttttgtgcaattggcaagtggtgatttcagccgctttgaggtcaatggtagaaaaggaaatatcttcgtataaaaactagacagaatcattcccacaaactgcgttgtgatgtgttcgttcaactcacagagtttaacctttctgttcatagagcagttaggaaacactctgtttgtaaagtctgtaagtggatattctgacatcttgtggccttcgttggaaacgggatttcttcatattctgctacacagaagaattctcagtaacttccttgtgttgtgtgtattcaacgcacagagttgaacgatcctttacacagagcagacttgaaacactctttttgtggaatttgcaagtggagatttcagccgctttgaggtcaatggtagaaaaggaaactatcttcatataaagactagacagaatgattctcagaaactcctttgtgctgtgtgcgttcaactcacagagtttaacctttcttttcatagagcagttaggaaacactctgtttgtaaagtctgcaagtggatattcagacatctttgaggctttcgttggaaacgggatttcttcatattctgctagacagaagaattcccagtaacatccttgtgttgtgtgtgttcaactcacagagttgaactttcatttacacagagcagatttgaaacactctttttgtggaatttgcaagtggagatttcaagcgctttgaggccaaaggcagaaaaggaaatatcttcgtttcaaaactagacagaatcattctcagaatctgctgcgtgatgtgtgcgttcaactctcagagtttaacttttcttttcattcagcggtttggaaacactctgtttgtaaagtctgcacgtggaaattttgaccacttagaggccttcgttggaaacgggtttttttcatgtaaggctagacagaagaattcccagtaacttccttgtgttgtgtgcattcaactcacagagttgaacgttcccttagacagagcagatttgaaacactctatttgtgcaatttgcaagtgtagttttcaagctctttaaggtcaacggcagaaaaggaaatatcttcgtttcaaaactagagagaacgattctcagaaactcctttgtgatgtgtgcgttcacctcacagagtttaacttttcttttcatagagcagttagtaaacactctgtttgtaaagtctgcaagtggatattcagacctctttgaggccttcgttggaaacgggatttcttcatattctgctagacagaaaaattctcagtaacttccttgtgttgtgtgtattcaactcacagagttgaacgatcctttacacatagcagacttgaaacactctttttgtggaatttgcaagtggagatttcagccgctttcaggtcaatagtagaaaaggaaatatcttcgtagaaaaactagacagaatgattctcagaaactcctttgtgatgtgtgtgttcaactcacagagtttaacctttcttttcatagagcagttagtaaacactctgtttataaagtctgcaagtgtatattcagacccctttgaggccttcgttggaaacgggatttcttcatattatgctagacagaagaattctcagaaacttccttgtgttgtgtgtattcaactcacagagttgaacgatcctttacacacagcagacttgagacactctttttgtggaatttgtaagtggagatttcagccgctttgaggtcaatggtagaaaaggaaatatcttcatataaaaactagacagaatcattctcagaaactgctctgcgatgtgtgcgttcaactctcagagtttaactttgcttttcattcagcagtttggaaacactctgtttgtaaagtctgcacgtggatattttgaccacttagaggccttcgttggaaacgggtttctttcctgtaaggctagatagaagaattctcagtaacttccttgtgttgtgtacattcaactcacagagttgaacgttcccttagacagagcagatttgaaacactctttttgtgcaattggcaagtggtgatttcagccgatttgaggtcaatggtagaaaaggaaatatcttcgtagaaaaactagacagaatcattcccacaaactgcgttgtgatgtgttcgttcaactcacagagtttaaccattcttttcatagagcagttaggaaacagtctgtttgtaaattctgtaagtggatattctgacatcttgtggccttcgttggaaacgggatttcttcatattctgctagacagaaggattctcagtaacttccttgtgttgtgtgtattcaactcacagagttgaacgatcctttacacagagcagacttgaaacactctttttgtggaatttgcaagtgcagatttcagccgctttgaggtcaatggtagaaaaggagatatcttcgtataaaaactagacagaaatgattctcagaaactcctttgtgatgtgtgcgttcaactcacagagtttaacctttctgttcatagagcagttaggaaacactctgtttgtaaagtctgcaagtggatactcagaacctccttcaggcattcgttggaaacgggatttcttcatattctgctagacagaagaattctcagtaacttcccttgtgttgtgtgtattcaactgacagagttgaactttcagttagagagagcagatttgaaacactgtttttgtggaatttgcaagtggagatttcaagcgctttggggccaaaggcagaaaacgaaatatcttcgtataaaaagtagacagaatcattctcagaaactgctctgcgatgtgtgcgttcaactctcagagtttaacttttcttttcattcagcagtttggaaacactctgtttgtaaagtctgcacgtggatattttgaccagttagaggccttcgttggaaacgggtttttttcctgtaaggctagacagaagaattcccagtaacttccttgtcttgtgtacattcaactcacagagttgaacgttcccttagacagagcagatttgaaacactctttttgtgcaattggcaagtggagatttcaagcgctttaaggtcaatggcagaaaaggaaatatcttcgtttcaaaactagagagaatcattcccaaaaactgcgttgtgatgtgttcgttcatctcacagagtttaacctttcttttcatacagcagttaggaaacagtctgtttgtaaattctgtaagtggatattctgacatcttgtggccttcgttggaaacgggatttcttcatattctgctagacagaagaattctcagtaacttccttgtgttgtgtgtattcaactcacagagttgaacgatcctttacacagggcggacttgaaacactctttttgtggaatttgcaattggagatttcagccgctttgaggtcaatggtagaaaaggaaatatcttcgtataaaaactagacagaatgattctcagaaacttcattgtgacgtgtgcgttcaactcacagagtttaacatttcttttcatagagcagttaggaaacactctgtttgtaaagtctgcaagtggatattcagacctctctgaggccttcgttggaaacgggatttcttcatactgtgccaaacagaagaattcccagtaacttccttgtgttgtgtgtgttcaactcacagagttgaactttcatttacacagagcagattggaaacactctttttgtggaatttgcaagtggagatttcaagcgctttgagaccaaaagcagaaaaggaaatatcttcgtataaaaactagacagaatcattctcagaacctgctctgcgatgtgtgcgttcaactctcagagtttaacttttcttttcattcagcagtttggaaacactctgtttctaaagtctgcacgtggatattttgaccacttagaggccttcgttggaaacgggtttttttcctgtaaggcttgacagaagaattcccagtaacttccttgtgttgtgtacattcaactcacagagttgaacgttcccttagacagagcagatttgaaacactctttttgtgcaattggcaagtggtgatttcagccgctttgaggtcaatggtagaaaaggaaatatcttcgtataaaaactagacagaatgattctcagaaacttcattgtgatgtgtgcgttcaactcacagagtttaacctttcttttcatagagcagttaggaaacactctgtttgtaaactctgcaagtggatattcagacctctttgctgccttcgttggaaacgggatttattcatactgtgctagacagaagaattctcagtaacttccttctgttgtgtgtattcaactcacagagttgaacgatcctttacacagagcggacttgaaacactctttttgtggaatttgcaagtggagatttcagccgcgttgaggtcaatggtagaaaaggaaatatcttcgtataaaaattagacagaatgattctcataaactcctttgtgatgtgtgcattcaactcacagagtttcacctttcttttcatagagcagttgggaaacactctgtttgtaaagtctgcaagtagatattcagacctccttgaggccttcgttggaaacgggatttcttcatattctgctagacagaagaattctcagtaacttccttgtgttgtgtgtattcaactgacagagttgaactttcatttagagagagcagatttgaaacactgtttttgtggaagttgcaagtggagatttcaagcgctttggggccaagggcagaaaaggaaatatcttcgtataaaaactagacagataatcattctcagaaactgctctgcgatgtgtgcgttcaactctcagagtttaacttttcttttcattcagcagtttggaaacactctgtttgtaaagtctgcacgtggatattttgaccatttagaggccttcgttggaaacgggtttttttcttgtaaggctagacagaagaattcccaggaacttccttgtgttgtgtacattcaactcacagagttgaacgttcccttagacagagcagatttgaaacactctttttgtgcaattggcaagtggtgatttcagccgctttgaggtcaatggtagaaaaggaaatatcttcgtataaaaactagacagaatcattcccacaaactgcgttgtgatgtgttcgttcaactcacagagtttaacctttcttttcatagagtagttaggaaacactctgtttgtaaagtctgcaagtggatattcagacctctttgaggccttcgttggaaacgggatttcttcatgttctgccagacagaataattctcagtaacttccttgtgttgtgtgtattctactcacagagttgaacgatcctttacacagagcagacttgaaacactctttttgtggaatttgcaagtggagatttcagccgctttgaggtcaatggtagaataggaaatatcatcctatagaaactagaccgaatgattctcagaaactcctttgtgatatgtgctttcaactcatagagttcaacctttcttttcatagagcacttgggaaacactctgtttgtaaagtctgcaagtggatattcagacttctttgaggccttcgttggaagcgggatttcttcatgttctgctagacagaagaattctcagtaacttaccttgtgttgtgtgtattcaactcacagagttgaatgatcctttacacagaacagtcttgaaacactctttttgtggaatttgctagtggagatttcagccgctttgatgtcaatggtagaataggaaatatcttcctatagaaactagacagaatgattctcagaaactcctttgtgatgtgtgtgttcaactcacagagtttaacctttcttttcatagagcagttaggaaacactctgtttgtaaagtctgcaagtggatattcagacctttttgagaccttcgttggaaacgggattttttcatataaggctagacagaagaattcccagtaacttccttgtgttgtgtgtgttcaactcacagagttgaactttgatttacacagagcagatttgaaacactctttttgtggaatttgcaagtggagatttcaagcgctttgaggccaaaggcagaaaaggaaatatcttcgtatgaaaactagacagaatcattctcagaaactgctgcgtgatgtgtgcgttcaactctcagagtttaacttttcttttcattcagcggtttggaaacactctgtttgtaaattctgcacgtggaaattttgaccacttagaggccttcgttggaaacgggtttttttcatgtaaggctagacagaagaattcccagtaacttccttgtgttgtgtacattcaactcacagagttgaacgttcccttagacagagcagatttgaaacactctttttgtgcaattggcaaatggagatttcaagcgctttaaggtcaatggcagaaaaggaaatatcatcgtttcaaaactagacagaatcattcccacaaactgcgttgtgatgtgttcgttcaactcacagagtttaacctttctgttcatagagcagttaggaaacactctgtttgtaaagtctgaaagtggatattctgacatccttgtggccttcgttgggaacgggatttcttcatattctgctagacagaagaattctcagtaacttccttgtgttgtgtgtattcaactcacagagttgaacgatcctttacacagagcagacttgaaacactcttgttgtgtaatttgcaagtggagatttcagccgctttgaggtcaatggtagaataggaaatatcttcctatagaaactagacagaatgattctcagaaactcctttgtgatgtgtgcgttcaactcacagagtttaacctttcttttcatagagcagttaggaaacactctgtttgtaaagtctgcaagtggatatacagacctctttgaggccttcgttggaaaccggatttcttcatattctgctagagagaagaattctcagtaacttccttgtgttgtgtgtattcaacttacagaggtgaacgatcctttacacagagcagacttgaaacactctttttgtggaatttgcaagtggagatttcagccgctttgaggtcaatggtagaaaaggaaatatcttcgtataaaaactagacagaatgattctcagaaactcctttgtgatgtgtgtgttcaactcacagagtttaacctttcttttcatagagcagttaggaaacactctgtttgtaaagtctgcaagtggatattttgacctctttgaggccttcgttggaaacgggttttttcatgtaaggctagacagaagaattctcagtaacttccttgtgttgtgtgtattcaactgacagagttgaactatcatttagagagagcagatttgaaacactgtttttgtggaatttgcaagtggagatttcaagcgctttggggccaaaggcagaaaaggaaatatcttcgtataaaaactagacacaatcattctcagaaactgctctgcgaagtgtgcgttcaactctcagagtttaacttttcttttcattcagcagtttggaaacactctgtttgtaaagtctgcacgtggataatttgaccacttagaggccttagttggaaacgggtttttttcatgtaaggctagacagaagaattcccagtaacttccttgtgttgtgtgcattcaactcacagagttgaactttcctttagacagagcagatttgaaacactctatttgtgcaatttgcaagtgtagatttcaagcgctttaaggtcaatggcagaaaaggaaatatcttcgtttcaaaactagacagaatcattcccacaaactgcgttgtgatgtgttcgttcaactcacagagtattaacctttctgttcatagagcagtgaggaaacactctgtttgtaaagtctgtaagtggatattctgacatcttgtggccttcgttggaaacgggatttcttcatattctgctagacagaagaattctcagtaacttctttgtgttgtgtgtattcaactcacagagttgaacgatcctttacacagagcagacttgaaacactctttttgtggaatttgcaagtggagatttcagccgctttgaggtcaatggtagaataggaaatatcttcctatagaaactagacagaatgattctcagaaactcctttgtgatgtttgcgttcaactcacagagtttaacatttcttttcatagagcagttaggaaacactctgtttatatagtctgcaagtggatattcagacctccttgaggccttcgttggaaacggggtttcttcatattctgctagacagaagaattctcagtaacttccttctgttgtgtgtattcaactgacagagttgaactttcatttagagagagcagatttgaaacactgtttttgtggaatttgcaagtggagatttcaagcgctttggggccaaaggcagaaaggaaatatcttcgtataaaaactagacagaatcattctcagaaactgctctgtgatgtgtgcgttcaactctcagagtttaacttttcttttcattcagcagtttggaaacactctgtttgtaaagtctgcacgtggatattttgaccacttagaggccttcgttggaaacgggttttcttcatgtaaggctagacagaagaattcccagtaacttccttgtgttgtgtgcattcaattcacacagatgaacgttcccttagacagagcagatttgaaacactctatttgtgcaatttgcaagtgtagatttcaagcgctttaaggtcaatggcagaaaaggaaatatcttcgtttcaaaactagacagaatgattctcagaaactcctttgtgatgtgtgcgttcaactcacagagtttaacctttcttttcatagagcagttaggaagcactctgttagtaaagtctgcaagtggatattcagacctccttgaggccttcgttggaaaggggatttcttcatattatgctacacagaagaattctcagtaactttccttgtgttgtgtgtattcaactcacagagttgaacgatcctttacacagagcagacttgaaacactctttttgtggcatttgcaagtggagatttcagccgctttgagttcaatggtagaataggaaatatcttcctatagaaactagacagaatgattctcagaaactcctttgtgatgtgtgtgttcaactcacagagtttaacctttcttttcatagagcagttgggaaacactctgtttgtaaagtctgcaagtggatattcagacatccttgaggctttcgttggaaacgggatttcttcatattctgctagaaagaagaattctcagaatcttccttgtgttgtgtgtattcaactcacagagttgaacgatcctttacacagagcagacctgaaacactctttttgtggaatttacaagtggagatttcagccgctttgaggtcaatggtagaaaaggaaatatcttcgtataaaaactagacagaatgattctcagaaactcctttgtgatgtgtgcgttctactcacagagtttaacctttcttttcatagagcagttaggaaacactctgtttgtaaagtctgcaagtggatattcagacatctttgagactttcgttggaaacgggatttcttcatattctgctagacagaagaattcccagtaacttccttgtgttgtgtgtgttcaactcagagagttgaactttcatttacacagagcagatttgaaacactctttttgtggaatttgcaagtggagatttcaagcgctttgaggccaaaggcagaaaaggaaatatcttcgtataaaaactagacagaatcattctcagaaacttctctgcgatgtgtgcgttcaactctcagagtttaacttttcttttcgttcagcagtttggaaacactctgtttgtaaagtctgcacgtggatattttgaccacttagaggccttcgttggaaacgggtttttttcctgtaaggctagacagaagaattcccagtaacttccttgtgttgtgtacattcaactcacagagttgaacgttcccttagacagagcagatttgaaacactctttttgtgcaattagcaagtggagatttcaagcgctttaaggtcaatggcagaaaaggaaatatcttactttcaaaactagacagaaatcattcccacaaactgcgttgtgatgtgttcgttcaactcacagagtttaacctttctgttcatagagcagttaggaaacactctgtttgtaaagtctgtaagtggatattctgatatcttgtggccttcgttggaaacgggatttcttcatattctgctagacagaagcaattctcagtaacttccttgtgttgtgtgtattcaactcacagagttgaaggatcctttacagagggcaggcttgaaacactctttttgtcgaatttgcaagtggagatttcagccgctttgaggtcaatggtagaataggaaatatcttcttatagaaactagacagaacgattctcagaaactcctttgtgatgtgtgcgttcaactcacagagtttaacctttcttttcatagagcagttacgaaacactctgtttgtaaagtctgcaagtggatattcagacctctttgaggccttcgttggaaacgggatttcttcatattctgctagacagaagaattctcagtaacttccttgtgttgtgtttattcaactcacagagttgaatgatcctttacacagagcagacttgaaacactctttttgtggaatttgcaagtggagatttcagccgctttgaggtcaatggtagaaaagtaaataccttcctataaagactagacagaatgattctcagaaactcctttgtgatgtgtgccttcaactcacagagtttaacctttcttttcatagagcagttaggaaacactctgtttgtaaagtctgcaagtggatattcagacctctttgaggccttcgttggaaacgggtttttttcatataaggctagacagaagaattctcagaaactttccttgtgttgtgtgtattcaactcacagagtagaacgatcctttacacagagcagacttgaaacactctttttgtggaatttgcaagtggagatttcagccgatttgaagtcaatggtagaaagggaaatatcttcgtatagaaactagacagaattattctcagaaactcctttgtgatgtgtgcgttcaactcacagagtttaacctttctgttcatagagcagttaggaaacactctgtttgtaaagtctgcaagtggatattcagacctccttgaggccttcgttggaaacgggatttcttcatattctgctagacagaagaattctcagaaacttccttgtgttgtgtgtattcaactcacagagttgaaggatcctttacacagagcagacttgaaacactctttttgtggaatttgcaagtggagatttcagccgctttgtggtcaatggtagaaaaggaaatatcttcgtataaagactagacagaatgattctcagaaacttctttgtgatgtgtgcgttcagctcacagagtttaacctttcttttcatagagcagttaggaaacactctgtttgtaaactctgcaagtggatattcagacctctttgaggccttcgttggaaacgggatttcttcatactatgctagacagaagaattcccactaacttccttgtgttgtgtgtgttcaactcacagagttgaactttcatttacacagagcagatttgaaacactctttttgtggaatttgcaagtggagatttcaagcgctgtgaggccaaaggcagaaaaggaagtatcttcgtataaaaactagacagaatcattctcagaaactgctctgtgatgtgtgcgttcaactctcagagtttaacttttcttttcattcagcagtttggaaacactctgtttgtaaagtctgcacgtggataatttgaccacttagaggccttcgttggaaacgggtttttttcatgtaaggctagacagaagagttctcagtaacttccttgtgttgtatgtattcaactcacacagttgaacgatcctttacagagagcagacttgtaacactctttttgtggaatttgcaagtggagatttcagccgctttgaagtcaaagtagaaaaggaaatatcttcctataaaaactagacagaatgattctcagaaaatcttttgtgatgtgtgcgttcaactcacagagtttaacttttcttctcatagagcagttaggaaacactctgtttgcaaagtctgcaagtggatattcagacctctttgaggccttcgttggaaacgggatttcttcaaattatgctagacagaagaattctcagtaacttccttgtgttgtgtgtattcaactcacagagttgaacgatcctttacacacagcagacttgaaacactctttttgtgtaatttgcaactggagatttcagccgctttgaggccaatagtagaaaaggaagtatcttcgtagaaaaactagacagaatgattctcagaaaatcttttgtgatgtgtgcgttcaactcacagagtttaacttttcttctcatagagcagttaggaaacactctgtttgtaaagtctgcatgtggatattcagacctctttgaggccttcgttggaaacgggatttctacatattatgctagacagaagaattctcagtaacttccttgtgttgtgtgtattcaactgacagagttgaactttcatttagagagagcagatttgaaacactgtttttgtggaatttgcaagtggagatttcaagcgctttggggccaaaggcacaaaaggaaatatcttcgtataaaaactagacagaatcattctcagcaaactgctgcgtgatgtgtgcgttcaactctcagagtttaacttttcttttcattcagcggtttggaaacactctgtttgtaaagtctgcacgtggaaattttgaccacttagaggccttcgttggaatcgggtttttttcatgtaaggctagacagaagaattcccagtaacttccttgtgttgtgtacattcaactcacagagttgaacgttcccttagacagagcagatttgaaacactctttttgtgcaattggcaagtggagatttcaagcgctttaaggtcaatggcataaaaggaattatcttcgtttcaaaactagacagaatcattcccaaaaactgcgttgtgatgtgttcgttcaactcacagagtttaacctttctgttcatagagcagttaggaaacactctgtttgtaaagtctgtaagtagatattctgacatcttgtggccttcgttggaaacgggatttcttcatattctgctagacagaagaaatctcagtaacttccttgtgttgtgtgtattcaactcacagagttgaacgatcctttacacagagcggacttgaaacacactttttgtggaatttgcaagtggagatttcagccgcgttgaggtcaatggtagaaaaggaaatatcttcgtataaaaactagacagaatgattctgagaaactcctttgtgatgtgtgcgttcaactcacagagtttaacctttcttttcatagagcagttaggaaacactctgtttgtaatgtgtgcaagtggatattcagacctccttgaggcctttgttggaaacgggatttcttcatattatgctagacaaaagaattctcagtaacttccttgtgttgtgtgtattcaactcacagagttgaacgatcctttacacagattggacttgaaacactctttttgtggaatttgcaagtggagatttcagccgcgttgaggtcaatggtagaaaaggaaatatcttcgtataaaaactagacagaatgattctcagaaactcctttgtgatgtgtgtgttcaactcacagagtttaacctttcttttcatagagcagttaggaaacactctgtttgtaaagtctgcaagtggatattcagacctctttgaggccttcgttggaaacgggattttttcatataaggctagacagaagaattcccagtaactttccttgtgttgtgtgtgttcaactcacagagttgaactttcatttacacagagcagatttgaaacactctttttgtggaatttgcaagtggagatttcaagcgctttgaggccaaaggcagaaaaggaaatatcttcgtttgaaaactagacagaatcattctcagaaactgctctgcgatgtgtgcgttcaactctcagagtttaacttttcttttcattcagcagtttggaaacactctgtttgtaaagtctgcacgtggataacttgaccacttagaggccttcgttggaaacgggttttttcatgtaaggctagacagaagaattcccagtaacttccttgtgttgtgtacattcaactcacagagttgaacgttcccttagacagagcagatttgaaacactctttttgtgcaattggcaagtggagatttcaagcgcttaaggtcaatggcagaaaaggaaatatcttcgtttcaaaactagacagaatgattctcagaaactcctttgtgatgtgtacgttcaactcacagagtttaacctttcttttcatagagcagttaggaaacactctgtttgtaaattctgtaagtggatattctgacatcttgtggccttcgttggaaacgggatttcttcatattctgctagacagaagaattctcagtagcttccttgtgttgtgtactttcaactcacagagttgaacgatcctttacacaggagcagattagaaacactctttttgtggaatttgcaagtggagatttcagccgctttgaggtcaatggtagaaaaggaaatatcttcataaaaaaactagacagaatgattctcagaaactcctttgtgatgtgtctgttcaactcacagagtttaacctttcttttcatagagcagttaggaaacactctgtttgtaaagtctgcaagtggatattcagacctctttgaggccttcgttggaaacgggtttttttcatataaggctagacagaagaattcccagtaacttccttgtgttgtgtgtgttcaactcacagagttgaactttcatttacacagagcagattggaaacactctttttgtggaatttgcaagtggagatttcaagcgctttgaggccaaaggcagaaaaggaaatatcttcgtataaaaactagaccgaatcattctcagaaactgctctgtgatgtgtgcgttcaactctcagagtttaacttttcttttcattcagcagtttggaaacactctgtttgtaaagtctgcacgtggataatttgaccacttagaggccttcgttggaaacgggtttttttcatgtaaggctagacagaagatttctcagtaacttccttgtgttgtgtgtattcaactcacacagttgaacgatcctttacacagagcagacttgtaacactctttttgtggaatttgcaagtggagatttcagccgctttgaagtcaaaggtagaaaaggaaatatcttcctataaaaactagacagaatcattcccacaaactgcgttgtgatgtgttcgttcaactcacagagtttaacctttctgttcatagagcagttaggaaacactctgtttgtaaagtctgtaagtggatattctgacatcttgaggccttcgttggaaacgggatttcttcatattctgctagagagaagaattctcagaaacttccttgtgttgtgtgtattcaactcacagagttgaacgatcctttacacagagcagacttgaaacacactttttttggtattttcaagtggagatttcagcagctttgagttcaatggtagaaaaggaaatatattcgtataaagactagacagaatgattctcagaaactactttgcgatgtgtgcgttcaactcacagagtttaacctttcttttcatagagcagttaggaaacactctgtttgtaaagtctgcaagtggatattcagacctccttgaggccttcgttggaaactggatttcttcatattatgctagacagaataattctcagtaacttccttgtgttgtgtgtattcaactcacagagttgaaggatcctttacagagagcaggcttgaaacactctttttctcgaatttgcaagtggagatttcagctgctttgaggtcaatggtagaataggaaatatcttcttatagaaactagacagaatcattctcagaaactgctctgcgatgtgtgcgttcaactctcagagtttaacttttcttttcattcagcagtgtggaaacactctgtttgtaaagtctgcacgtggatattttgaccacttagaggccttcgttggaaacgggtttttttccctgtaaggctagacagaagaattcccagtaacttccttgtgttgtgtgcattcatctcacagagttgaacgttcccttagacagagcagatttgaaacactctatttgtgcaatttgcaagtgtagatttcaagcgctttaaggtcaatggcagaaaaggaaatatcttcgtttcaaaactagacagaatcattcccacaaactgcgttgtgatgtgttcgttcaactcacagagtttaaccttccttttcatagagcagttaggaaacactctgtttgtaaagtctgcaagtggatattcagacctccttgaggccttcgttggaaacgggatttcttcatattctgctagacagaagaattctcagtaacttccttgtgttgtgtgtattcaactcacagagttgaacgatcctttacacagagcagacttgaaacactctttttgtggaatttgcaagtggagatttcatccgctttgaggtcaatggtagaataggaaatatcttcctatagaaaatagacagaatgattctcagaaactccgttgtgatgtgtgcgttcaactcacagagtttaacctttcttttcatagagcagttgggaaacactctgtttgtaaagtctgcaagtggatattcagacctccttgaggctttcgttggaaacgggatttcttcatattctgctagaaagaagatttctcagaaacttccttgtgttgtgtgttttcaactcacagagttgaacgatcctttacacagagcagacttgaaacactctttttgtggaatttgcaagtggagatttcagccgctttgaggtcaattgtagaaaaggaaatatcttcgtataaaaactagacagaatgattctcagaaactcctttgtgatgtgtgcattcaactcacagagtttaacctttcttttcatagagcagttaggaaacactctgtttgtaaagtctgcaagtggatattcagacctctttgatgccttcgttggaaacgggatttcttcatattctgctagacagaagaattcccagtaacttaccttgtgttgtgtacattcaactcacagagttgaacgttcccttagacagagcagatttgaaacactctttttgtgcaattggcaagtggagatttcaagcgctttaaggtcaatggcagaaaaggaaatatcttcgtttcaaaactagacagaatcattcccacaaactgcgttgtgatgtgttcgttcaactcacagagtttaacctttctgttcatagagcagtcaggaaacactctgtttgtaaagtctgtaagtggatattctgacatcttgtggccttcgttggaaacgggatttcttcatattctgctagacagaagaattctcagtaacttccttgtgttgtgtttattcaactcacagaggtgaatgatcctttacacagagcagacttgaaacactctttttgtggaatttgcaagtggagatttcagccgctttgaggtcaatggtagaaaagtaaatatcttcgtataaagactagacagaatgattctcagaaactcctttgtgatgtgtgcgttcaactcacagagtttaacttttcttttcatagagcagttaggaaacactctatttgtaaagtctgcaagtggatattcagacctctttgaggccatcgttggaaacgggatttcttcatattatgctagacagaagaattctcagtaacttccttgtgttgtgtgtattcaactcacagagttgaacgatcctttacacagagcagacttgaaacactctttttgtggaatttgcaagtggagatttcagccgctttgaggtcaatggtagaataggaactatcttcctatagaaactagacagaacgattctcagaaactcctttgtgatgtgtgcgttcaactcacagagtttaacctttcttttcatagagcagttaggaaacactctgtttgtaaagtctgcaagtggatattcagacccctttgaggcctgcgttggaaacgggatttcttcatattctgctagacagaagaattcccagtaacttccttgtgttgtgtgtgttcaactcacagagttgaactttgatttacacagagcagatttgaaacactctttttgtggaatttgcaagtggagatttcaagcgctttcaggccaaaggcagaaaaggaaatatcttcgtataaaaactagacagaatcattctcagaaactcctctgcgatctgtgcgttcaactctcagagtttaacttttcttttcattcaccagtttggaaacactctgtttgtaaagtctgcacgtggatattttgaccacttagaggccttcgttggaaacgggtttttttcctgtaaggctagacagaagaattcccagtaacttccttgtgttgtgtgcattcaactcacagagttgaacgttcccttagacagagcagatttgaaacactctatttgtgcaatttgcaagtgtagatttcaagtgtttaaggtcaatggcagaaaaggaaatatcttcgtttcaaaactagacagaatcattcccacaaactgcgttgtgatgtgttcgttcaactcacagagtttaacctttcttttcatagagcagttaggaaacactctgttggtaaattctgtaagtggatattctgacatcttgtggccttcgttggaaacgggatttcttcatattctgctacacagaagaattctcagaatcttccttgtgttgtgtgtattcaactcacagagttgaacgatcctttacacagagcagacttgaaacactctttttgtagaatttgcaagtggagatttcagccgctttgaggtcaatggtagaaaaggaaatatcttcgtataaaaactagacagaatgattctcagaaactcctttgtgatgtgtgcgttcaactcacagagtttaaacctttcttttcatagagcagttaggaaacactctgtttgtaaagtctgcaagtggatattcagacatctttgaggctttcgttggaaacgggatttcttcatattctgctagacagaagaattctcagtaacttccttgtgttgtgtgtattcaactcacagagttgaacgatcctttacacagagcaggcttgaaacactctttttgtggaatttgcaagtggagatttcagccgctttgagttcaatggtagaaatggaaatatcttcctatagaaactagacagaatgattctcagaaacttctttgtgatgtgtgtgttcaactcacagagtttaacctttcttttcatagagcagttaggaaacactctgtttgtaaagtctgcaagtggatattcagacctctttgaggccttcgttggaaacgggtttttttcatataaggctagacagaagaattcccagtaacttcccttgtgttgtgtgtgttcaactcacagagttgaactttcatttacccagagcagatttgaaacactctttttgtggaatttgcaagtggagatttcaagcgctttgaggccaaaggcagaaaaggaaatatcttcgtttcaaaactagacagaatcattctcataaactgctgcgtgatgtgtgcgttcaactctcagagtttaacttttctttttattcagcggtttggaaacactctgtttgtaaagtctgcacgtggatattttgaccacttagaggccttcgttggaaacgggtttttttcatgtaaggctagacagaagaattcccaataacttccttgtgttgtgtacattcaactcacagagttgaacgttcccttagacagagcagatttgaaacactctttttgtgcaattggcaagtggagatttcaagcgctttaaggtcaatggcagaaaaggaaatctcttcgtttcaaaactagacagaaatcattcccacaaactgcgttgtgatgtgttcgttcaactcacagtagtttaacctttctgttcatagagcagttaggaaacactctgtttgtaaagtctgtaagtggatattctgacatcttgtggccttcgttggaaacgggatttcttcgtattctgctagacagaagaattctcagtaacttccttgtgttgtgtgtattcaactcacagagttgaacgatcctttacacagagcggacttgaaacacactttttgtggaatttgcaagtggagatttcagccacgttgaggtcaatggtagaaaaggaaatatcttcgtataaaaactagacagaatgattctcagaaactcctttgtgatgtgtgtgttcaactcacagagtttaacctttcttttcatagagcagttaggaaacactctgtttgtaaagtctgcaagaggatattcagacctctttgaggccttcgttggaaacgggtttttttcatataaggctagacagaagaattcccagtaacttccttgtgttgtgtgtgttcaactcacagagttgaactttcatttacacagagcagatttgaaacactctttttgtggaatttgcaagtggagatttcaagcgctttgaggccaaaggcagaaaaggaaatatcttcttttcaaaactagacagaatcattctcagaaactgctctgcgatgtgtgcgttcaactctcagagtttaacttttcttttcattcagcagtttggaaacactctggttgtaaagtctgcacgtggataacttgaccacttagaggccttcgttggaaacgggtttttttcctgtaaggctagacagaagaattcccagtaacttccttgtgttgtgtacattcaactcacagagttgaacgttcccttagacagagcagatttgaaatactctttttatgcaattggcaagtggaaatttcaagcgctttaaggtcaatggcagaaaaggaaatatcttcgtttcaaaactagacagaatcattcccacaaactgcgttgtgatgtgttcgttcaactcacagagtttaacctttctgttcatagagcagttaggaaacactctgtttgtaaagtctgtaagtggatattctgacatcatgtggccttcgttggaaacgggatttcttcatattctgctagacagaagaattctcagtaacttccttgtgttgtgtttattcaactcacagagttgaatgatcctttacacagagcagacttgaaacactctttttgtggaatttgcaagtggagatttcagccgctttgaggtcaatggtagaaaagtaaatatcttcggataaacactagacagaatgattctcagaaactcctttgtgatgtgtgtgttcaactcacagagtttaacttttcttttcatagagcagttaggaaacactctgtttgtaaagtctgcaagtggatattcagacctctttgaggccttcgttggaaacgggatttcttcatattctgctagacagaagaattcccagtaacttccttgtgttgtgtgtgttcaactcacagagttgaactttcatttacacagagcagatttgaaacactctttttgtggaatttgcaagtggagatttcaagcgctttgaggccaaaggcagaaaaggaaatatcttcgtttcaaaactagactgaatcattctcagaaactgctctgcgatgtgtgcgttcaactctcagagttcaacttttcttttcattcagcagtttggaaacactctgtttgtaaagtctgcacgtggataatttgaccacttagaggccttcgttggaaacggtttttttttcatgtaaggctagacagaagaatttcccagtaacttccttgtgttgtgtgcattcaactcacagagttgaacgttcccttagacagagcagatttgaaacactctatttgtgcaatttgcaagtgtagatttcaagcgctttaaggtcaatggcagaaaaggaaatatcttcgtttcaaaactagacagaatcattcccacaaactgcgttgtgatgtgttcgttcaactcacagaagtttaacctttcttttcatagagcagttaggaaacagtctgtttgtcaattctgtaagtggatattctgacatcttgtggtcttcgttggaaacgggatttcttcatattctgctagacagaagaattctcagtaacttccttgtgttgtgtgtattcaactcacagagttgaacgatcttttacacagagcagacttgaaacattctttttgtggaatttgcaagtggagatttcagccgctttgaggtcaatggtagaataggaaatatcttcctatagaaactagacagaatgattctcataaactcctttgtgatgtgtgcattcaactcacagagtttcacctttcttttcatagagcagttaggaaacactctgtttgtaaagtctgcaagtggatattcaggcctcttgaggccttcgttggaaacgggatttcttcatattctgctagacagaataattctcagtaacttccttctgttgtgtgtattcaactcacagagttgaaggatcctttacagagagcaggcttgaaacactctttttgtcgaatttgcaagtggagatttcagccgctttgaggtcaatggtagaataggaaatatcttcttatagaacctagacaaaatgattctcagaaacttctttgtgatgtgtgcgttcaactcacagagtttaacctttcttttcatagagcagttaggaaacactctgtttgtaaactctgcaagtggatattcagacctctttgaggccttcgttggaaacgggatttcttcatactatgatagacagaagaattctcagtaacttctttgtgttgtgtgtattcaactcacagagttgaacgatcctttacacagagcagacttgaaacactctatttgtagaatttgcaagtggagatttcagccgctttgaggtcaatagtagaaaaggaaatatcttcgtagaaaaactagacagaacgattctcagaaactcctttgtgatgtgtgcgttcaactcacagagtttaacctttcttttcatagagcagttaggaaacactctgtttgtaaagtctgcaagtggatattcagacctctttgagaccttcgttggaaacgggatttcttcatattctgctagacagaagaattctcagtaactttccttgtgttgtgtgtattcaactgacagagttgaactttcatttagagagagcagatttgaaacactgtttttgtggaatttgccagtggagatttcaagcgctttggggccaaaggcagaaaaggaaatatcttcgtataaaaactagacagaatcattctcagaaactgctctgcgatgtgtgccttcagctctcagagtttaacttttcttttcattcagcagtttggaaacactctgtttgtaaagtctgcacgtggatattttgaccacttagaggtcttcgttggaaacgggtttttgtcatgtaaggctagacagaagaattcccagtaacttccttgtgttgtgtgcattcaactcacagagttgaacgttcccttagacacagcagatttgaaacactctatttgtgcaatttgcaagtgtagatttcaagcgctttaaggtcaatggcagaaaaggaaatatcttcgtttcaaaactagacagaatcattcccacaaactgcgttgtgatgtgttcgttcaactcacagagtttaacctttctgttcatagagcagttaggaaacactctgtttgtaaagtctgtaagtggatattcagacctccttgaggctttcgttggaaacgggatttcttcatattctgctagacagaggaattctcagtaacttccttgtgttgtgtgtattcaactcacagagttgaacgatcctttacccagagcagacttgaaacactctttttgtggaatttgcaagtggagatttcagccgctttgaggtcaatggtagaataggaaatatcttcctatagaaactagacagaattattctcagaaactcctttgtgatgtgtgcgttcaactcacagagtttaacctttcttttcatagagcagttaggaaacactctgtttgtaaagtctgcaagtggatattcagacctctttgaggccttcgttggaaacgtgatttcttcatattctgctagacagaaagaattctcagtaacttccttgtgttgtgtgtattcaactcacagagttgaacgatcctttacacagagcagacttgaaacactctttttgtggaatttgcaagtgaagatttcagccgctttgaggtcaatggtagaataggaaatatcttcctatagaaaatagacagaatgattctcagaaactcccttgtgatgtgtgcgttcaactcacagagtttaacctttcttttcatagagcagttaggagacactctgtttgtaaagtctgcaagtggatattcggacctctttgaggccttcattggaaacgggatttcttcatattctgctagacagaagaattctcagtaacttctttgtattgtgtgtattcaactcacagagttgaacgatcctttacacagagcagacttgaaacactctttttgtggaatttgcaagtggagatttcatccgatttgaggtcaatggtagaataggaaatatcttcctatggaaactagacagaatgattctcagaaactcctttgtgatgcgtgtgttcaactcacagagtttaacctttcttttcatagagcagttagtaaacactctgtttataaagtctgcaagtggatattcagacccctttgaggccttcgttggaaacgggatttcttcatattatgctagacagaagaattctcagtaacttccttgtgttgtgtgtattcaactgacagagttgaactttcatttagagagagcagatttgaaacactgtttttgtggaatttgcaagtggagatttcaagcgctttggggccaaaggcagaaaaggaaatttcttcgtataaaaactagacagaatcattctcagaaactgctgcgtgatgtgtgcgttcaactctcagagtttaacttttcttttcattcagcggtttggaaatactctgtttgtaaagtctgcacgtggacattttgaccacttagaggccttctttggaaacgggtttttttcatgcaaggctagacagaagaattcccagtaacttccttgtgttgtgtgcattcaactcacagagttgaacgttcccttagacagagcagatttgaaacactctatttgtgcaatttgcaagtgtagatttcaagcgcattaaggtcaatggcagaaaaggaaatatcttcgtttcaaaattagacagaatcattcccacaaactgcgttgtaatgtgtgcgttcaactcacagagtttaacctttcttttcatagagcagttaggaaacactctgtttgtaaagtctgcaagtggatattcagacctctttgaggccttcgttggaaacgggatttcttaatattctgctagacagaagaattctcagtaacttccttgtgttgtgtgtattcaactcacagagttgaacgatcctttacaaagagcagacttgaaacactctttctgtggaatttgcaattggagatttcagccgctttgaggacaatggtagaataggaaatatcttcctatagaaactagacagaatgattctcataaactcctttgtgatgtgtgcgttcaactcacagagtttaacctttcttttcatagtgcagttaggaaacactctgtttctaaactctgcaagtggatattcagacatccttgaggccttcgttggaaacgggatttcttcatattctgctagacagaagaattctcagtaacttccttgtgttgtgtgtattcaactcacagagttgaacgatcctttacacagagcacacttgaaacactccttttgtggaatttgcaagtggagatttcagccgctttgaggtcaatagtagaaaaggaaatatcttcgtagaaaaactagacagaatgattctcagaaacttctttgtgatgtgtgcgttcaactcacagagtttatcctttcttttcatagagcagttaggaaacactctgtttgtaaactctgcaagtggatattcagacctctttgaggccttcgttggaaacgggatttctccatactgtgctagacagaagaattctcagtaacttcccttgtgttgtgtgtattcaagtgacagagttgaactttcatttagagagagcagatttgaaacactgtttttgtggaatttgcacgtggagatttcaagcgctttggggccaaaggcagaaaaagatatatcttcgtataaaaactagacagaatcattctcagaaactgctctgcgatgtgtgcgttcaactctcaggagtttaacttttcttttcattcagcagtttggaaacactctgtttgtaaagtctgcacgtggatattttgaccacttagaggccttcgttggaaatgggtttttttcctgtaaggctagacagaagaattcccagtaacttccttgtgttgtgtacattcaactcacagagttgaacgttcccttagacagagcagatttgaaacactctttttgtgcaattggcaaatggagatttcaagcgctttaagttcaatggcagaaaaggaaatatcttcgtttcaaaactagacagaatcattcccacaaactgcgttgtgatgtgttcgttcaactcacagagtttaacctttctgttcatagagcagttaggaaacactctgtttgtaaagtctgtaagtggatattcggacatcttgtggccttcgttggaaacgggatttcttcatattctgctacacagaagaattctcagaatcttccttgtgttgtgtgtattcaactcacagagttgaacgatactttacacagagcagacttgaaacactctttttgtggaatttgcaagtggagatttcagccgctttgaggtccatggtagaaaaggaaatatcttcgtataaaaactagacagaatgattctcagaaactcctttgtgatgtgtgcgttcaactcacagagtttaacctttcttttcatagagcagttaggaaacactctgtttgtaaagtctgcaagtggatattcggacctctttgaggccttcgttggaaacgggtttttttcatataaggctagatagaagaattctcagtaacttccctgtgttgtgtgtattcaactcacagagttgaacgatcctttacacagagcagacttgtaacactctttttgtggaatttgcaagtggagatttcagccgctttgaagtcaaaggtagaaaaggaaatatcttcctataaaaactagacagaatcattctcagaaactgctgcgtgatgtgtgcgttcaactctcagagtttaacttttcttttcattcagcggtttggaaacactctgtttgtaaagtctgcacgtagatattttgaccacttagaggccttcgttggaaacgggtttttttcatgtaaggctagacagaagaattcccaggaacttccttgtgttgtgtacattcaactcacagagttgaacgttcccttagacagagcagatttgaaacactgtttttgtgcaattggcaagtggtgatttcagccgctttgaggtcaatggtagaaaaggaaatatcttcgtataaaaactagacagaatgattctcagaaactcctttgtgatgtgtgcgttcaactcacagagtttaacctttcttttcatagagcagttaggaaacactctgtttgtaaattctgcaagtggatattcagacctccttgaggccttcgttggaaacgggatttcttcatattctgctatacagaagaattctcagaaacttccttgtgttttgtgtattcaactcacagatttgaacgatcctttacacagagcagacttgaaacactctttttctggaatttgcaagtggagatttcagccgctttgaggtcaatggtagaaaaggaaatatcttcgtataaaaactagacagaatgattctcagaaactcctttgtgatgtgtgtgtccaactcacagagtttaacctttcttttcatagagcagttaggaaacactctgtttgtaaagtctgcaagaggatattcagacctctttgaggccttctttggaaacgggattttttcatataaggctagacagaagaattcccagtaacttccttgtgttgtgtgtgttcaactctgtgagttgaactttcatttacacagagcagattggaaacactctttttgtggaatttgcaagtggagatttcaagcgctttgaggccaaaggcagaaaaggaaatatcttcgtataaaaactagacagaattattctcagaaactgctgcgtgatgtgtgcgttcaactctcagagtttaacttttcttttcattcagcggtttggaaacactctgtttgtaaagtctgcacgtggatattttgaccacttagaggccttcgttggaaacgggttttttttcatgtaaggctagacagaagaattctcaataacttccttgtgttgtgtgtattcaactgacagagttgaaccttccttcagacagagcagatttgcaacagtctttttgtgtaatttgcaagtggagatttcaagcgctttgaggccaaaggcagaaaaggaaatatcttcgtataaaaactagacagaatgattctcagaaactcctttgtgatgtgtatgttcaacttacagagtttaacttttctattcatagagtagttaggaaacactctgtttgtaaagtctgcaagtggatattttgacctctttgaggccttcgttggaaacgggtttttttcatgtaaggctagacagaagaattctcagtaacttccgcgtgttgtgtgtattcaactcacagagttgaacgatcctttacacagagcagacttgtaacactctttttgtggaatttgtaagtggagatttcagccgctttgaagtcaaaggtagaaaaggaaatatcttcctataaaaactagacagaatgattctcagaaactcctttgtgatgggtgcgttcaactcacagagtttaacctttcttttcatagagcagttaggaaacactctgtttgtaaagtctgcaagtggatattcagacctctttgagaccttcgttggaaacgggtttttttcatataaggctagacagaagaattctcagtaacttccttgtgttgtgtgtgttcaactcacagagttgaactttcatttacacagagcagatttgaaacactctttttgtggaatttgcaaatggagatttcaagcgctttgaggccaaaggcagaaaaggaaatatcttcgtataaaaactagacagaatcattctcagaaactgctctgtgatgtgtgcgttcaactctcagagtttaacttttgttttcattcagcagtttggaaacactctgtttgtaaagtctgcacgtggatattttgaccacttagaggcattcgttggaaacgggtttttttcatgtaaggctagacagaagaattcccagtaacttccttgtgttgggtgcattcaactcacagagttgaacgttcccttagacagagcagatttgaaacactctatttgtgcaatttgcaagtgtagatttcaagcgctttaaggtcaatggaagaaaaggaaatatcttcgtttcaaaactagacagaatcattcccacaaactgcgttgtgatgtgttcgttcaactcacagagtttaacctttctgttcatagagcagttaggaaacactctgtttgtaaagtctgtaagtggatattctgacatcttgtggccatcgttggaaacgggatttcttcatattctgctagacagaagaattctcagaaacttccttgtgttgtgtgtattcaactcacagagttgaacgatcgtttacacagagcagacttgagacactctttttgtggaatttgtaagtggagatttcagccgctttgaggtcaatggtagaaaaggaaatatcttcgtataaaaactagacagaacgattctcagaaactcctttgtgatgtgtgcgttcaactcacagagtttaacctttcttttcatagagcagttaggaaacactctgtttataaagtctgcaagtggatattcagacccctttgaggccttcgttggaaacgggatttcttcatattatgctagacagaagatttcccagtaacttccttgtgttgtgtgtgttcaactcacagagttgaactttcatttacacagagcagatttggaacactctttttgtggaatttgcaaatggagatttgaagcgctttgaggccaaaggcagaaaaggaaatatcttcgtataaaaactagacagaatcattctccgaagctgctgactgatgtgtgcgttcaactctcagagtttaacttttcttttcattcagcggtttggaaacactctgtttgtgaagtctgcacgtggatattttgaccacttagaggccttcgttggaaacgggttttttgcatgtaaggctagacagaagaattctcagtaacttccttgtgttgtgtgcattcaactcacagagttgaacgttcccttagacacagcagatttgaaacactctatttgtgcaatttgcaagtgtagatttcaagcgctttaaggtcaatggcagaaaaggaaatatcttcgtttcaaagctagacagaatcattcccacaaactgcgttgtgatgtgttcgtacaactcacagagtttaacctttctgttcatagagcagttaggaaacactctgtttgtaaagtctgtaagtggatattctgacatcttgtggccttcgttggaaacgggatttcttcatattctgctagacagaagaattctcagtaacttccttgtgttgtgtttattcaactcacagagttgaatgatcctttacacagagcagacttgaaacactctttttgtggaatttgcaagtggagatttcagccgctttgaggtcaatggtaggaaaggaaatatcttcgtataaagactagacagaatgattctcagaaactcctttgtgatgtgtgcgttcaactcacacagtttaacctttcttatcatagagcagttaggaaacactctgtttgtaaagtctgcaagtggatattccgacctccttgaggccttcgttggaaacgggatttcttcatattatgctagacagaagaattctcagtaacttccttgtgttgtgtgtattcaactcacagagttgaacgatcctttacacagagcagatttgaaacactctttttgtggaatttgcaagtggagatttcagccgctttgaggtcaatggtagaaaaggaaatatcttcgtataaagactagacagagtgattctcagaaactcctttgtgatgtctgcgttcaactcacagagtttaacctttcttttaatagagcagttaggaaacactctgtttgtaaagtctgcaagtggatattcagacctccttgaggccttcgttggaaacgggatttctacatattatgctagacagaagaattctcagtaacttccttgtgttgtgtgtattcaactcacagagttgaacgatccttcacacagagcagacttgaaacactctttttgtggaatttgcaagtggagatttcagccgctttgaggtcaatggtagaaaaggaaatatcttcgtataaagactagacagaatgattctcagaaactccttagtgatgtgtgcgttcaactcacagagtttaacctttctgttcatagagcagttaggaaacactctgtttgtaaagtatgcaagtggatatacagacctccttgaggccttcgttggaaacgggatttcttcatattctgctagacagaagaattctcagtaacttccttgtgttgtgtgtattcaactcacagagttgaacggttctttacacagagcagatttgagacactctttttgtggaatttgtaagtggagatttcagccgctttgaggtcagtggtagaaaaggaaatatcttcgtataaaaactagacagaatgattctcagaaactctttgtgatgtgtgtgttcaactcacagagtttaacctttcttttcatagagcagttaggaaacgctctgtttgtaaagtctgcaagtggatattcagacctcgttgagaccttcgttggaaacgggatttcttcatattctgctagacagaagaattctcagtaacttctttgtgttgtgtgtattcaactcacagaggtgaacgatcctttacacagagcagacttgaaacactctttttgtggaatttcaagtggagatttcagccgctttgaggtcaatggtagaataggaaatatcttcctatagaaactagacagaatgattctcagaaactcctttgtgatgtgtgcgttcaactcacagagtttaacctttctctccattgagcagttaggaaacactctgtttgtaaagtctgcaagtggatattcagacctcctagaggccttctttggaaacaggctttcttcatattatgctagacagaagaattctcagaaacttctttgtgttgtgtgtattcaactcacagagttgaacgatcctttacacagagcagacttgaaacactctttttgtggaatttgcaagtggagatttcagccgctttgaggtcaatggtagaataggaaatatcttcctatagaaactagacagaatgattctcagaaactcctttgtgatgtgtgcgatcaactcacagagtttaacttttcttttcatagagcagttaggaaacactctgtttgtaaagtctgcaagtggatattcagacctctttgaggccttcgttggaaacgggatttcttcatattatgctagacagaagaattctcagtaacttccttgtgttgtgtgtattcaactgacagagttgaactttcatttacacagagcagatttgaaacactctttttgtggaatttgcaaatggagatttcaagcgctttgaggccaaaggcagaaaaggaaatatcttcgtataaaaactagacagaatcattctcagaaactgctgcatgatgtgtgcgttcaactctcagagtttaacttttcttttcattcagcggtttggaaacactctgtttgtaaagtctgcacgtggaaattttgaccacttagaggccttcgttggaaacgggtttttttcatgtaaggctagacagaagaattcccagtaacttccttgtgttgtgtgcattcaactcacagagttgaacgttcccttagacagagcagatttgaaacactctatttgtgcaatttgcaagtgtagttttcaagctctttaaggtcaacggcagaaaaggaaatatcttggtttcaaaactagacagaatcattcccacaaactgcgttgtgatgtgttcgttcaactcacagtgtttaacctttctgttcatagagcagttaggaaacactctgtttgtaaagtctgcaagtggatattcagacctccttgaggccttcgttggaaacgggatttcttcatattctgctagacagaagaattctaagtaacttccttgtgttgtgtgtattcaactcacagagttgaacgatcctttacacagagcagacttgaaacactctttttgtggaatttgcaagtggagatttcagccgctttgaggtcaatggtagaaaaggaaactatcttcatataaagactagacagaatgattctcataaactcctttgtgatgtgtgcgttcaactctcaaagtttaacttttcttttcatagagcagttaggaaacactctgtttgtaaagtctgcaagtggatattcagacctctttgaggccttctttggaaacgggatttcttcatattatgctagacagaagaattctcagtaacttccctgtgttgtgtgtattcaactgacagagtcgaactttcatttagagagagcagatttgaaacactgtttttgtggaatttgcaagtggagatttcaagcgctttggggccaaaggcagaaaaggaaatatcttcgtataaaaactagacagaatcattctcagaaactgctctgcgatgtgtgcgttcaactctcagagtttaacttttcttttcattcagaagtttggaaacactctgtttgtaaagtctgcacgtggataacttgaacacttagaggccttcgttggaaacgggtttttttcatgtaaggctagacagaagaattctcagtaacttccttgtattgtgtgtattcaactcacagagttgaacgatcctttgcacagagcacacttgtaacactctttttgtggaatttgcaagtggagatttcagccgctttgaagtcaaaggtagaaaaggaaataacttcctataaaaactagacagaatgattctcataaactcctttgtgatgtgtgcgttgaactcacagagtttaacctttcttttcatagagcagttaggaaacactctgtttgtaaagtctgtaagtggatattctgacatcttgtggccttctttggaaacgggatttcttcatattgtgctagacggaagaattctccgtaacttccttgtgttgtgtgtattcaactcacagagttgaacgatcctttacacagagcagacttgtaacactctttttgtggaatttgcaagtggagatttcagccgctttgaagtcaaaggtagaaaaggaaatatcttcctataaaaattagacagaatgattctcagaaactcctttgtgatgtgtgcgttcaactcacacagtttaacttttcttttcatacagcagttaggaaacactctgtttgtaaagtctgcaagtggatattcagacctccttgaggccttctttggaaacgggatttcttcatattatgctagacagaagaatccccagtaacttccttgtgttgtgtgtgttcaactcacagagttgaactttgatttacacagagcagatttgaaacactctttttgtggaatttgcaagtggagatttcaagcgctttggggccaaaggcagaaaaggaaatatcttcgtataaaaactagacagaatcattctcagaaactgctctgcgatgtgtgcgttcaattctgagtttaacttttcttttcattcagcagtttggaaacactctgtttgtaaagtctgcacgtggatattttgaccacttagaggccttcgttggaaacgggtttttttcctgtaaggctatacagaagaattcccagtaacttccttgtgttgtgtacattcaactcacagagttgaacgatcccttagacagagcagatttgaaacactctttttgtgcaattggcaagtggagacttcaagcgctttaaggtcaatggcagaaaaggaaatatcttcgtttcaaaactagacagaatcattcccacaaactgcgttgtgatgtgttcgttcaactcacagagtttaacctttctgttcgtagagcagttaggaaacactctgtttgtaaagtctgtaagtggatattctgacatcttgtggccttcgttggaaacgggatttcttcatattctgctagacagaagaattctcagtaacttccttgtgttgtgtgtattcaactcacagagttgaacgatcctttacagagagcagacttgaaacactctttttgtggaatttgcaagtggagatttcagccgctttgaggtctatggtagaaaaggaaatgtcttcgtataaagactagacagaacgattctcagaaactcctttgtgatgtgtgtgttcaactcacagagtttaacctttcttttcatagagcagttagtaaacactctgtttataaagtctgcaagtggatattcagacccctttgtggccttctttggaaacgggatttcttcatattatgctagacagaagaattctcagtaacttccttgtgttgtgtgtattcaactcacagtagttgaacgaccctttacacagagtagacttgaaacactctttttgttgaatttgcaagtggagatttcagccgctttgaggtcaatggtagaataggaaatatcttcctatagaaactagacagaatgattctcagaaactcctttgtgatgtgtgagttcaactcacagagtttaacctttcttttcatagagtagttaggaaacactctgtttgtaaagtctgcaagtggatattcagacctctttgaggccttcgttggaaacgggattttttcatataaggctagagagaagaattcccagtaacttccttgtgttgtgtgtgttcaactcacagagttgaactttcatttagtcagagcagatttgaaacactctttttgtggaatttgcaaatggagatttcaagcgctttgaggccaaaggcagaaaaggaaatatcttcgtataaaaactagacagaataattctcagaaactgttctgcgatgtgtgcgttcaactctcagagtttaacttttcttttcattcagcagtttggaaacactctgtaaactctgcatgtggatattttgaccacttagaggccttcgtcggaaacgggtttttttcctgtaaggctagacagaagaattcccagtaacttccttgtgttgtgtacattcaactcacagagttgaacgttcccttagacagagcagatttgaaacaatctttttgtgcaattggcaagtggtgatttcagccgctttgaggtcaatggtagaaaaggaaatatcttcgtataaaaactagacagaatcattcccacaaaactgcgttgtgatgtgttcgttcaattcacagagtttaacctttctgttcatagagcagttaggaaacactctgtttgtaaagtctgtaagtggatattctgacatcttgtggccttcgttggaaacgggatttcttcgtattctgctagacagaaagaattctcagtaacttccttgtgttgtgtgtattcaactcacagagttgaacgatcctttacacagagcagacttgaatcactctttttgtggaatttgcaagtggagatttcagccgctttgaggtcaatagtagaaaaggaaatatcttcgtagaaaaactagacagatgattctcagaaactcctttgtgatgtgtgcgttcaactcacagagtttaaactttcttttcatagagcagttaggaaacactctgtttgtaaagtctgcaagtggatattcagacctctttgaggccttcgttggaaacgggatttcttcatattctgctagacagaagaattcccagtaacttccttgtgttgtgtgtgttcaactcacagagttgaactttcatttacaaagagcagatttgaaacactctttttgtggaatttgcaagtggagatttcaagcgctttgaggccaaaggcagaaaaggaaatatcttcgtataaaaactagacagaatcattctcagaaactgctgcgtgatgtgtgcgttcaactctcaggagtttagcttttcttttcattcagcggtttggaaacactctgtttgtaacgtctgcacgtggatattttgaccacttagaggccttcgttggaaacgggttttttgcatgtaaggctagacagaagaattcccagtaacttccttgtgttgtgtgcattcaactcacagagttgaacgttcccttagacagagcagatttgaaacactctatttgtgcaatttgcaagtgtagatttcaagcgctttaaggtcaatggcagaaaaggaaatttcttcgttgcaaaactagacagaatcattcccacaaactgcgttgtgatgtgttcgttcatctcacagagtttaacctttcttttcgtagagcagttaggaaacagtctgtttgtaaattctgtaagtggatattctgacatacttgtggccttcgttggaaacgggatttcttcatattctgctagacagaagaattctcagaatcttccttgtgttgtgtgtattcaactcacagagttgaacgatcctttacacagagcagacttgaaacactctttttgtggaatttgcaagtggagatttcagccgctttgaggtccatggtagaaaaggaaatctcttcgtataaaaactagacagaatgattctcagaaaatcctgtgtgatgtgtgcgttcatctcacagagtttaacctttcttttcatagagcagttaggaaacactctgtttgtaaagtctgcaagtggatattcagacctccttgaggccttccttggaaacgggatttcttcatattctgctagacagaagaattctcagtaacttccttgtgttgtgtgtattcaactgacagagttggactatcattttgagagagcagatttgaaacactgtttttgtggaatttgcaagtggagatttcaagcgctttggggccaaaggcagaaaaggaaatatcttcgtataaaaactagacagaatcattctcagaaactgctctgcgatgtgtgcgttcaactctcagagtttaacttttcttttcattcagcagtttgaaaacactctgtttgtaaagtctgcacgtggataatttgaccacatagaggccttcgttggaaacgggtttttttcatgtaaggctagacagaagaattcccagtaacttccttgtgttgtgtgcattcaactcacagagttgaacgttcccttagacagagcagatttgaaacactctatttgcgcaacttgcaagtgtagatttcaagcgctttaaggtcaatggcagaaaaggaaatatcttcgtttcaaaactagacagaatcattccctcaaactgcgttgtgatgtgttcgttcaactcacagagtttaacctttcttttcatagagcagttaggaaacagtctgtttgtaaattctgtaagtggatattctgacatcttgtggccttcgttggaaacgggatttcttcatattctgctagacagaagaattctcagaatcttccttgtgttgtgtgtattcaactcacagagttgaacgatcctttacacagagcagacatgaaacactctttttgtggaatttgcaagtggagatttcagccgctttgaggtccatggtagaaaaggaaatatcttcgaataaaaactagacagaatgattctcagaaactcctttgtgatgtgggcgttcaactcacagagtttaaccttccttttcatagagcagttaggaaacactctgtttgtaaagtctgcacgtggatatttggacttctttgaggccttcgttggaaacgggtttttttcatgtaaggctagacggaagaattctcagtaacttccttgtgttgtgtgtattcaactgacagagttgaactttcatttggagagagcagatttgaaacactatttttgtggtatttgcaagtggagatttcaagcgctttggggccaaaggcagaaaaggaaatatcctcgtataaaaacaagacagaatcattctcagaaactgctctgcgatgtgtgcgttcaactctcagagtttaacttttcttttcattcagcagtttggaaacactctgtttgtaaagtctgcacgtggataatttggccacttagaggccttcgttggaaacgggttttttcatgtaaggctagacagaagaattcccagtaacttccttgcgttgtgtacattcaactcacagagttgaacgttcccttagacagagcagatttgaaacactctttttgtgcaattggcaagtggagatttcaagcgctttaaggtcaatggcagaaaaggaaatatcttcgtttcaaaactagacagaatcattcccacaaactgcgttgtgatgtgttcgttcaaatcacagagtttaacctttcttttcatagagcagttaggaaacagtctgtttgtaaattctgtaagtggatattctgacatcttgtggccttcgttggaaacgggatttcttcatattctgctagacagaagaattctcagtaacttccttgtgttgtgtgtattcaactcacagagttgaacgatcctttacagagagcaggcttgaaacactctttttgtggaatttgcaagtggagatttcagccgctttgaggtcaatggtagaatgggaaatatcttcctatagaaactagacagaatgattctcagaaactcctttgtgatgtgtgtgttcaactcacagagtttaaccttttttttcatagagcagttaggaaacactctgtttgtaaagtctgcaagaggatattcagacctctttgaggccttcgttggaaacgggtttttttcatataaggctagacagaagaattcacagtaacttccttgtgttgtgtgtattcaactgacagagttgaactttcatttagagagagcagatttgaaacactgtttttgtggaatttgcaagtggagatttcaagcgctttggggccaaaggcagaaaaggaaatatcttcgtataaaaactagacagaatcattctcagaaactgctgcgtgatgtgtgcgttcaactctcagagtttaacttttcttttcattcagcggtttggaaacactctgtttgtaaagtctgcacgtggatattttgaccacttagaggccttcgttggaaacgggttttttttcatgtaaggctagacagaagaattcccagtaacttcccttgtgttgtgtacattcaactcacagagttgaacgttccgttagacagagcagatttgaaacactctttttgtgcaattggcaaatggagatttcaagcgctttaaggtcaatggcagaaaaggaaatatcttcgtttcaaaactagacagaaatcattcccacaaactgcgttgtgatgtgttcgttcaactcacagcagtttaacctttcttttcatagagcagttaggaaacagtctgtttgtcaattctgtaagtggatattctgacatcttgtggccttcgttggaaacgggatttcttcatattctgctagacagaagaattctcagtaacttccttgtgttgtgtgtattcaactcacagagttgaacgatcctttacacagagcagacttgaaacactctttttgtggaatttgcaagagtagatttcaagcgctttaaggtcaatggcagaaaaggaaatatcttcgtttcaaaactagacagaatgattctcagaaactcctttgtgatgtgtgcgttcaacacacagagtttaacttttcttttcatagagcagttaggaaacactctgtttgtaaagtctgcaagtggatattcagacctctttgaggccttcgttggaaacgggatttcttcatattctgctagacagaagaattctcagtaacttccttgtgttgtgtgtattcaactcacagagttgaacgatcctttacacagagcagacttgaaacactctttttgtggaatttgcaagtggatatttcagccgctttgaggtcaatagtagaaaaggaaatatcttcgtagaaaaactagacagaatcattctcagaaactgctgcgtgatgtgtgcgttcaactctcagagtttaacttttcttttcattcagcggtttggaaacactctgcttgtaaagtctgcacgtggatattttgaccacttagaggccttcgttggaaacgggtttttttcatgtaaggctagacagaagaattcccagtaacttccttgtgttgtgtgcattcaactcacagagttgaacgttcccttagacagagcagatttgaaacactctatttgtccaatttgcaagtgtagatttcaagcgctttaaggtcaacggcagaaaaggaaatatcttcgtttcaaaactagacagaatgattctcagaaaatcttttgtgatgtgtgcgttcaactcacagagattaacttttcttctcatagagcagttaggaaacactctgtttgtaaagtttgcaagtggatattcagacctctttgaggccttcgttggaaacgggatttcttcatattatgctagacagaagaattctcagtaacttccttgtgttgtgtgtattcaactcacagagttgaacgatcctttacagagagcagacttgaaacacactttttgtggaatttgcaagtggagttttcagccgctttgaggtcaattgtagaaaaggaaatatcttcgtataaagactagacagaatgattctcataagctcctttgtgatgtgtgcgttcaactcacagagtttaacctttcttttcatagagcagttaggaaacactctgtttgtaaagtctgcaagtggatattcagacctccttgaggccttcgttggaaacgggatttcttcatattctgctagacagaagaattctcagaaacttccttgtgttgtgtgttttcaactcacagagttgaacgatgctttacacagagtagacttgaaacactctttttgtgaaatttgcaagtagagatttcagccgctttgaggtcaacggtagaaaaggaaatatcttcctataaaaactagacagaatgattctcagaaactcctttgtgatgtgtgtgttcaactcacagagtttaacgtttcttttcatagagcagttagtaaacactctgtttataaagtctgcaagtggatattcagacccctttgaggccttcgttggaaacgggatttcttcatattatgctagacagaagaattctcagtaacttccttgtgttgtgtgtattcaactcacagagttgaactttcatttacacagagcagatttgaaacactctttttgtggaatttgcaaatggagatttcaagcgctttgaggccaaaggcagaaaaggaaatatcttcgtttcaaaactagacagaatcattctcagaaactgctgcgtgatgtgtgcgttcaactctgagagtttaacttttcttttcattcagcggtttggaaacactctgtttgtaaagtctgcacgtggatattcagacctctttgaggccttcgttggaaacgggtttttttcatgtaaggctagacagaagaattcccagtaacttccttgtgttgtgtacattcaactcacagagttgaacgttcccttatacagagcagatttgaaacactctttttgtgcaattggcaagtggagatttcaagcgctttaaggtcaatggcagaaaaggaaatatcttcgtttcaaaactagacagaatcattcccacaaagtgcgttgtgatgtgttcgttcaactcacagagtttaacctttctgttcatagagcagttaggaaacactctgtttgtaaagtctgtaagtggatattctgacatcttgtggccttcgttggaaacgggatttcttcatattctgctagacagaagaattctcagtaacttccttgtggtgtgtgtattcaactcacagagttgaacgatcctttacacagagcagacttgagacactcattttgtggaatttgcaagtggagatttcagccgctttgaggtcaatggtagaaaaggaaactatcttcatataaagactagacagaatgattctcacaaactcctttgtgatgtgggcgttgaactcacagagtttaacctttcttttcatagagcagttaggaaacactctgttggtaaagtctgaacgtggatatttggacttctttgtggtcttcgttggaaacgggtttttttcatgtaaggctagacagaagaattctcagtaacttccttgtgttgtgtgtattaaactgacagagttgaactttcatttagagagagcagatttgtaacactgtttttgtggaatttgcaagtggagatttcaagcgctttggggccaaaggcagaaaaggaattatcttggtataaaaactagacagaatcattctcagtaactgctctgtgatgtgtgcgttcaactctcagagtttaacttttcttttcattcagcagtttggaaacactctgtttgtaaagtctgcacgtggatattttgaccacttagaggccttctttggaaacggttttttctcatgtaaggctagacagaagaattcccaggaacttacttgtgttgtgtacattcaactcacagagttgaacgttcccttagacagagcagatttgaaacactctttttgtgcaattggcaaatggagatttcaagcgctttaaggtcaatggcagaaaaggaaatatcttcgtttcaaaactagacagaatcattcccacaaactgcgttgtgatgtgtgcgttcaactcacagagtttaacctttctgttcatagagcagttaggaaacactctgtttgtaaagtctgtaagtggatattctgacatcttgtggccttcgttggaaacgggatttcttcatattctgctagacagaataattctcagtaacttccttgtgttgtgtgtattcaactcaaagagttgaaggatcctttacagagagcaggcttgaaacactctttttgtcgaatttgcaagtggagatttcagctgctttgaggtcaatggtagaataggaaatatcttcttatagaaactagacagaatgattctcagaaactcctttgtgatgtgtgcgttcaactcacagagttcaacctttcttttcatagagcagttaggaaacactctgtttgtaaagtctgcaagtggatattcagacctccttgaggccttcgttggaaacgtgatttcttcatattatgctagacagaagaattctcagtaacttcccttgtgttgcgtgtattcaactcacagagttgaacgatcctttacaaagagcagacttgaaacactctttttggggaatttgcaagtggagatttcagccgctttgaggtcaatggtagaatagggaatatcttcctatagaaactagacagaatgattctcagaaactcctttgtgatgtgtgcgttcaactctcagagtttaacttttcttttcattcagcagtttggaaacactctgtttgtaaagtctgcacgtggataatttgaccacttagaggctttcgttggaaacgggtttttttcctgtaaggctagacaaaagatttcccagtaacttccttgtgttgtgtgcattcaactcacagagttgaacgttccgttagacagagcagatttgaaacactctatttgtgcaatttgcaagtgtagatttcaagcgctttaaggtcaatggcagaaaaggaaatatcttcgtttcaaaaccagacagaatcattcccacaaactgcgttgtgatgtgttcgttcaactcacagagtttaacctttctgttcatagagcagttaggaaacactctgtttgtaaagtctgcaagtggatattcagacctccttgaggccttcgttggaaatgggatttcttaatattctgctagacagaagaattctcagaatcttccttgtgttgtgtgtattcaactcacagagttgaacgatcctttacacagagcagacttgaaacactctttttgtggaatttgcaagtggagatttcagcctctttgaggtccatggtagaaaaggaaatatcttcgtataaaaactagacagaatgattctcagaaaatcttttgtgatgtgtgcgttgaactcacagagtttaacttttcttctcatagagcagttaggaaacactctgtttgtacagtctgcaagtggatattcagacctctttgaggccttcgttggaaacgggatttcttcatattatgctagacagaagaattcccagtaacttcccttgtgttgtgtgtgttcaactcacagagttgaactttcatttacccagagcagatttgaaacactctttttgtggaatttgcaagtggagatttcaagcgctttgaggccaaagacagaaaaggaaatatcttcgtttcaaaactagacagaatcattctcagaaactgctgcgtgatgtgtgcgttcaactctcagagtttaacttttcttttcattcagcagtttggaaacactctgtttgtaaagtctgcacgtggaaattttgaccacttagaggccttctttggaaacgggattttttcatgtaaggctagacagaagaattcccagtaacttccttgtgttgtgtgcattcaactcacagagttgaacgttcccttagacagagcagatttgaaacactctatttgtgcaatttgcaagtgtagttttcaagctctttaaggtcaacggcagaaaaggaaatatcttcgtttcaaaactagacagaatcattcccacaaactgcgttgtgatgtgttcgtccaactcacagagtttaacctttctgttcatagagcagttaggaaacactttgtttgtaaagtctgtaagtggatattctgacatcttgtggccttcgttggaaacgggatttcttcatattctgctagacagaagaattctcagtaacttccttttgctgtgtgtattcaactcacatagttgaatgatcctttacacagagcagattagaaacacactttttgtggattttgcaagtggagatttcagccgctttgaggtcaatggtagaaaaggatatatcttcgtatagaaactagacagaatgattctcagaaactactttgtgatgtgtgcgttcaactcacagagtttaacctttcttttcctagagtagttaggaaacactctgtttttaaagtctgcaagtggatattcagacctctttgaggccttcgttggaaacgggatttcttcatattatgctagacagaagaattcccagtaacttccttgtgttgtgtgtgttcaactcacagagttgaactttcatttacacagagcagatttgaaacactctttttgtggaatttgcaagtggagatttcaagcgctttgaggccaaaggcagaaaaggaaatatcttcgttcaaaactagacagaatcattctcagaaactgctctgcgatgtgtgcgttcaactctcagagtttaacttttcttttcatgcagcagtttggaaacactctgtttgtaaagtctgcacgtggataacttgaccacttagaggacttcgttggaaacgggtttttttcctgtaaggctagacagaagaattcccagtaacttccttgtgttgtgtacattcaaatcacagagttgaacgttcccttagacagagcagacttgtaacactctttttgtggaatttgcaagtggagatttcagccgctttgaagtcaaaggtagaaaaggaaatatcttcctataaaaactagacagaatgattctcagaaactcctttgtgatgtgtgtgttcaactcacagagtttaacatttcttttcatagagcagttaggaaacactctgtttgtaaagtctgcaagtggatattcagacctagttgaggccttcgttggaaacgggatttcttcatattctgctagacagaagaattctgagtaacttccttgtgttgtgtttattcaactcacagagttgaatgatcctttacacagagcagacttgaaacactctttttgtggaatttgcatgtggagatttcagccgctttgtggtcaatggtagaaaaggaaatatcttcgtataaagactagacagaatgattctcagaaactcctttgtgatatgtgcgttcaactcacagagtttaacctttcttttcatagagcagttaggaaacactctgcttgtaaagtctgcaagtggatattcagccctctttgaggccttcgttggaaatgggtttttttcatataaggctagacagaggaattcccagtaacttccttgtgttgtgtgtgttcaactcacagagttgaactttcatttacacagagcagatttgaaacactctttttgtggaatttgcaagtggagatttcaagcgctttgaggccaaaggaagaaaaggaaatatcttcgtttcaaaactagacagaatcattctcagaaactgctgcgtgatgtgtgcgttcaactctcagagtttaacttttcttttcattcagcggtttggaaacactctgtttgtaaagtctgcacgtggatattttgaccacttagaggccttcgttggaaacgggttttttttcatgtaaggctagacagaagaattcccagtaacttccttgtgttgtgtgcattcagctcagagagttgaaccttcccttagacagagcagatttgaaacactctatttgtgcaatttgcaagtgtagatttcaagcgcttcaaggtcaatggcagaaaaggaaatatcttcgtttcaaaactagacagaatcattcccacaaactgcgttatgatgtgttcgttcaactcacagagtttaacctttcttttcatagagcagttaggaaacagtctgtttgtaaattctgtaagtggatattctgacatcttgtggccttcgttggaaacgggatttcttcatattctgctagacagaagaattctcagtaactaccttgtgttgtgtgtattcaactcacagagttgaacgatcctttacacagagcggacttgaaacactcgttttgtggaatttgcaagtggagatttcagccgcgttgaggtcaatggtagaaaaggaaatatctacgtataaaaactagacagaatgattctcagaaactcctttgtgatgtgtgcgttcaactcacagagtataacctttcttttcatagagcagttaggaaacactctgtttgtaaagtctgcaagtggatattcagacctctttgaggccttcgttggaaacgggtttttttcatataaggctagacagaagaattcccagtaacttcccttgtgttgtgtgtgttcaactcacagagttgaactttcatttacacagagcagatttgaaacactctttttgtggaatttgcaggtggagatttcaagcgctttgaggccaaaggcagaaaaggaaatatcttcgtataaaacctagacagaatcattctcagaaactgctgcgtggtgtgtgcgttcaactctcagagtttaacttttcttttcattcagcggtttggaaacactctgtttgtaaagtctacacgtggatattttgaccacttagaggccttcgttggaaactggttttcttcatgtaaggctagacagaagaattcccaggaacttccttgtgttgtgtacattcaactcacagagttgaacgttcccttagacagagcagatttgaagcactctttttgtgcaattggcaagtggtgatttcagccgctttgaggtcaatggtagaaaaggaaatatcttcgtataaaaactagacagaatgattctcagaaactcctttgtgatgtgtgcgttcaactcacagagtttaacctttcttttcatagagcagttaggaaacactgtttgtaaagtctgcaagtggatattcagacatccttgaggccttcattggaaacgggatttcttcatattatgctagacagaagaattctcagtaacttccttgtgttgtgtgtattcaactcacagagttgaacgatcctttacacagagcagacttgaaacactctttttgtggaatttgcaagtggagatttcagccgctttgaggtcaatggtagaataggaaatatcttcctatagaaactggacagaacgattctcagaaactcctttgtgatgtgtgcgtacaactcacagagtttaacctttcttttcatagagcagttaggaaacactctgtttgtaaagtctgcaagtggatattcagacctctttgaggccttcgttggaaacgggatttcttcatattcctgctagacagaagaattcccagtaacttccttgtgttgtgtgtgttcaactcacagtgttgaactttcatttacacagagcagattggaaacactctttttctggaatttgcaagtggagatttcaagcgctttgaggccaaaggcagaaaaggaaatatcttcgtataaaaactagacagaatcattctcagaaactgctgcgtgatgtgtgcgttcaactctcagagtttaacttttcttttcattcagcgctttggaaacactctgtttgtaaagtctgcacgtggaaattttgaccacttagaggccttcggttggaaacgggtttttttcatgtaaggctagacagaagaattctcagtaacttccttgtgttgtgtgtattcaactcacagagttgaacgatcctttacacagagcagattgaaacactctttttgtggaatttgcaagtggagatttcagccgctttgaggtcaatggtagaaaaggaaatatcttcgtataaagactagacagaatgattctcagaaactcctttgtgatgtgtgcgttcaactcacagagtttaacctttctgttcatagagcagttaggaaacactctgtttgtaaagtctgtaagtggatattctgacatcttgtggtcttcgttggaaacgggatttctgcatattctgctagacagaataattctcagtaacttccttgtgttgtgtgtattcaactcacagagttgaacgatcctttacagagagcagacttgaaacactctttttgtggaattcgcaagtggagatttcagccgctttgaggtcaatgttagaaaaggatatatcttcgtataaagactagacagaatgattctcagaaactcctttgtgatgtgtgcgttcaactcacagagtttaacctttcttttcatagagcagttaggaaaccctctgtttataaagtctgcaagtggatattcagacctctttgaggccttcgttggaaacgggatttcttcatattatgctagacagatgaattctcattaacttccttgtgttgtgtgtattcaactcacagagttgaacgatcctttacacagagcggacttgaaacactctttttgtggaatttgcaagtggagatttcagccgcgttgaggtcaatggtagaaaaggaaatctcttcgtataaaaactagacagaatgattctcagaaactcctttgtgatgtgtgtgttcaactcacagagtttaaccttagttttcatagagcagttaggaatcactctgtttgtaaagtctgcaagtggatattcagacctctttgaggccttcgttggaaacgggtttttttcatataaggctagacagaagaattctcagtaacttccttatgttgtgtgtattcaactgacagagttgaactttcgtttagagagagcagatttgaaacactctttttgtggaatttgcaagtggagatttcaagcgctttggggccaaaggcagaaaaggaaatatcttcgtataaaaactagacagaatcattatcagaaactgctgcgtgatgtgtgtgttcaactctcagagtttaacttttcttttcattcagcggtttagaaacactctgtttgtaaagtctgcacgtggatattttgtccacttagaggccttcgttggaaacgggttttttgcatgtaaggctagacagaagaattccccagtaacttccttgtgttgtgtacattcaactcacagagttgaacgttcccttacacagagcagatttgaaacactctttttgtgcaattggcaagtggagatttcaagcgctttaaggtcaatggcagaaaaggaaatatcttcgtttcaaaactagacagaatcattcccagaaactgcgttgtgatgtgttcggtaaactcacagagtttaaccattcttttcatagagcagttaggaaacagtctgtttgtaaattctgtaagtggatattctgacatcttgtggccttcgttggaaacgggatttcttcatattctgctagacagaagaattctcagtaacttccttgtgttgtgtgtattcaactcacagagttgaaccatctttcacacagagcagatctgaaacactctttttgtggaatttgcaagtggagatttcagccaccttgaggtcaatggtagaaaaggaaatatcttcgtataaaaactagacagaatgattctcagaaactcctttgtgatgtgtgcgttcaactcacagagttcaacctttcttttcatagagcagttaggaaacactctgtttgtaaagtctgcaagtggatattcagacctccttgaggccttcgttggaaacgggatttcttcatattatgcaagacagaagaattctcagtaacttccttgtgttgtgtgtattcaactcacagagttgaaagatcctttacagagagcagacttcaaacactctttttgtggaatttgcaagtggagatttcaggcgctttgaggtcaatggtagaaaaggaaactatcttcgtataaagactagacagaatgattctcagaaactcctttgtgatgtgtgcgttcaactcacagagtttaacttttcttttcatagagcagttaggaaacactctgtttgtaaagtctgcaagtggatattcagacatctttgaggctttcgttggaaacgggatttcttcatattctgctaggcagaagaattctcagtaacttccttgtgttgtgtgtattcaactcacagagttgaacgattctttacacagagcagacttgaaacactctttttgtggaatttgcaagtggagatttcagccgctttcatgtcactggtagaaaaggaaatatcttcgtataaagactagacagaatgattctcagaaactcctttgtgatgtgtgcgttcaactcacagagttcaacctttcttttcatagagcagttgggaaacactctgtttgtaaagtctgcaagtggatattcagacttctttgaggccttctttggaagcgggatttcttcatgttctgctagacagaagaattctcagtaacttccttgtgttgtgtgtattcaactcacagagttgaatgatcctttacacagaacagacttgaaacactcttgttgtggaatttgcaagtggagatttcagccgctttgtggtcaacggtagaataggtaatatcttcctatagaaactagacagaatcattctcagaaactgctctgcgatgtgtgcgttcaactctcacagtttaacttttcttttcattcagcagtttggaaacactctgtttgtaaagtctgcacgtggataatttgaccacttagaggccttcgttggaaacgggttattttcatgtaaggctagacagaagaattcccagtaacttccttgtgttgtgtgcattcaactcacagagttgaacgttcccttagacagagcagatttgaaacactctatttgtgcaatttgcaattgtagatttcaagcgctttaaggtcaatggcagaaaaggaaatatcttcgtttcaaaactagacagaatcattcccacaaactgcgttgtgatgtgttcgttcaactcacagagtttaacctttctgttcatagagcagttaggaaacactctatttctaaagtctgtaagtggatattctgacatcttgtggccttcgttggaaactgggatttcttcatattctgctagacagaagaattcccagtaacttccttgtgttgtgtgcattcaactcacagagttgaacgatcctttacacagagcagacttgaaacactctttttgtggaatttgcaagtggacatttcagccgctttgaggtcaatagtagaaaaggaaatatcttcgaagaaaaactagacagaatgattctcagaaactcctttgtgatgtgtgcgttcaactcacactgtttaacctttcttttcatagagcagttaggaaacactctgtttgtaaagtctgcaagtggatattcagacctccttgaggcattcgttggaaacgggatttcttcatattatgctagacagaagaattcccagtaacttccttgtgttgtgtgtgttcaactcacagagttgaactttcatttacacagagcacatttgaaacactctttttgtggaatttgcaaatggagatttcaagcgctttgaggccaaaggcagaaaaggaaatatcttcgtttcaaaactagacagaatcattctcagaaactgctgcgtgatgtgtgcgttcaactctcagagtttaacttttcttttcattcagccgtttggaaacactctgtttataaagtctgcacgtggaaattttgaccacttagaggccttcgttggaaacgggtttttttcatgtaaggctagacagaagaattcccagtaaattccttgtgttgtgtacattcaactcacagagttgaacgttcccttagacagagcagatttgaaacactctttttgtgcaattggcaagtggagatttcaagcgctttaaggtcaatggcagaaaaggaaatatcttcgtttcaaaactagacagaatcattcccacaaactgcgttgtgatgtgttcgttcatctcacagagtttaacctttcttttcatagtgcagttaggaaacactctgtttgtaaattctgtaagtggatattctgacatcttgtggccttcgttggaaacgggatttcttcatattctgctagacagaagaattctcagaatcttccttgtgttgtgtgtcttcaactcacagagttgaacgatggtttacacagagcagatttgaaacactctttttgtggaatttgcaagtggagatttcagccgctttgaggtcaatggtagaaaaggaaatgtcttcgtataaaaactagacagaatgattctcagaaactcctttgtgatgtgtgcgttcaactcacagagtttaacctttcttttcatagagcagttaggaaacactctgtttgtaaagtctgcaagtggatattcagacctctttgaggccttcgttggaaacgggtttttacatataaggcttgacagaacaattcccagtaacttccttgtgttgtgtgtgttcaactcacagagttaaactttcatttacacagagcagatttgaaacactctttttgtggaatttgcaagtggagatttcaagcgctttgaggccaaaggcagaaaaggaaatatcttcgtataaaaactagacaaaatgattctcagaaactcctttgtgatgtgtgcgttcaactcgcatagtttaacctttcttttcatagagcagttaggaaacactcggtttgtaatgtctgcacgtggatatttggacttctttgaggccttctttggaaacgggttttttccatgtaaggctagacagaagaattcccagtaacttcattgtgttgtgtgcattcaactcacagagttgaacgttcccttagagcagatttgaaacactctatttgtgcaatttgcaagtgtagatttcaagcgctttaaggtcaatggcagaaaaggaaatatcttcgtttcaaaactagacagaatcattcccacaaactgcgttgtgatgcgttcgttcaactcacagagtttaacctttctgttcatagagcagttaggaaacactctgtttgtaaattctgcaagtggatattcagacctccttgaggccttcgttggaaacgggatttcttcatattctgctagacagaagaattctcagtaacttcccttgtgttgtgtgtattcaactcacagagttgaacgatcctttacacagagcagacttgaaacactctttttgtggaatttgcaggtggagatttcagccgctttgtgttcaatggtagaataggaaatatcttcctatagaaactagacagaatgattctcagaaactcctttgagatgtgtgtgttcaactcacagagtttaaccttgcttttcatagagcagttaggaatcactctgtttgtaaagtctgcaagtggatattcagacctctttgaggccttcgctggaaacgggtttttttcatataaggctagacagaagaattctcagaatcttccttgtgttgtgtgtattcaactcacagagttgaacgatcctttacacagagcagatttgaaacactctttttgtggaatttgcaaatggagatttcaagcgctttgaggccaaaggcagaaaaggaaatatcttcgtataaaaactagacagaatcattctcagaaactgctctgcgatgtgtgcatgcaactctaagagtttaacttttcttttcattcagcagtttggaaacactctgtttgtaaagtctgcacgtggataatttgaccacttagaggccttcgttggaaacgggtttttttcatgtaaggctagacagaagaattcccagtaacttccttgtgttgtgtacattcaactcacagagttgaacgttcccttagacagagcagacttgtaacactctttttgtggaatttgcaagtggagatttcagccgctttgaaatcaaaggtagaaaaggaaatatcttcctataaaaactagacagaatgattctcagaaactcctttttgatgtgtgcgttcaactcacagagtttaacctttcttttcatagagcagttaggaaacactctgtttgtaaagtctgcaagtggatattcagacctctttgaggccttcgttggaaacgggatttcttcatattctgctagacagaagaattctcagtaacttccttgtgttgtgtgtattcaactcacagagttgaaagatcctttacacagagcattcttgaaacactctttttgtggaatttgcaagtggagatttcagacgctttgaggtcaatagtagaaaaggaaatatcttcgtagaaaaactagacagaatgattctcagaaactcctttgtgatgtgtgcgttcaactcacagagtttaaacctttcttttcatagagcagttaggaaacactctgtttgtaaagtctgcaagtggatattcagacctccttgagaccttcgttggaaacgggtttttttcatataaggctagacagaagaattctcagtaacttccttgtgttgtgtgtattcaactgacagcagttgaactttcatttagagagaggagatttgaaacactgtttttgtggaatttgcaagtggagatttcaaacgctttggggccaaaggcagaaaaggaaatatattcgtataaaaactagacagaatcattctcagaaactgctgcgtgatgtgtgcgttcgactctcagagtttaacttttcttttcattcagcggtttggaaacactctgtttgtatagtctgcacgtggatattttgaccacttagaggccttctttggaaacgggtttttttcatgtaaggctagacagaagaattcccaggaacttccttatgttgtgtacattcaactgagagagttgaacgttcccttagacagagcagatttgaaacactctttttgtgcaattggcaagtggtgatttcagccggtttgaggtcaatggtagaaaaggaaatatcttcgtataaaaactagacagaatcattaccacaaactgcgttgtgatgtgttcgttcaactcacagaatttaacctttctgttcatagagcagttaggaaacactctgtttgtaaagtctgtaagtggatattctgacatcttgtggccttcgttggaaacgggatttcttcatattctgctggacagaagaattctcagaatcttccttgtgttgtgtgtattcaactcacagagttgaacgatggtttacacagtagcagatttgaaacactcttttggtggaatttgcaagtggagatttcagccgctttgaggtcaatggtagaaaaggaaatatcttcgtataaaaactagacagaatgattctcagaaactgctttgtgatgtgtgcgttcaactcacagagtttaacctttcttttcatagagcagttaggaaacactctgtttgtaaagtctgcaagtggatattcagacctctttgaggccttcgttggaaacgggtttttttcatgtaaggctagacagaagaattctcagtaacttccttgtgttgtgtgtattcaactgacagagttgaactttcatttagagagagcagatttgaaacactgtttttgtggaatttgcaattggagatttcaagcgctttggggccaaaggcagaaaaggaaatatcttcgtataaaaactacacagaatcattctcagaaactgctctgcgatgtgtgcgttcaactctcagagtttaacttttcttttcattcagcagtttggaaacactctgtttgtaaagtctgcacgtggatattttgaccatttagaggccttcgttggaaacgggtttttttcctgtaaggctagagagaagaattcccagtaacttccttgtgttgtgtgcattcaactcacagagttgaacgttcccttagacagagcagatttgaaacactctatttgtgcaatttgcaagtgtagatttcaagcgctttaaggtcaatggcagaaaaggaaatatcttcgtttcaaaattagacagaatcattcccacaaactgcgttgtgatgtgttcgttcaactcacagactttaacctttctgttcatagagcagttaggaaacactctgtttgtaaagtctgcaagtggatattcagacctccttgaggccttcgttggaaacgggatttcttcatattctgctagacagaaagaattctcagtaacttccttgtgttgtgtgtattcaactcacagagttgaacgatcctttacacagagcagacttgaaacactctttttgtggaatttgcaagtggagatttcagccgctttgaggtcaaaggtagaaaaggaaactatcttcatataaagactagacagatgattctcagaaactcctttgtgatgtgtgcgttcaacccacagagttcaacctttcttttcatagagcagttgggaaacactctgtttgtaaagtctgcaagtggatattcagacttctttgaggccttcgttggaagcgggatttcttcatattctgctagacagaagaattcccagtaacttccttgtgttgtgtgtattcaactcacagagttgaactttcatttacacaggagcagatttgaaacactctttttgtggaatttgcaaatggagatttcaagccctttcaggccaaaggcagaaaaggaaatatcttcgtataaaaactagacagaatcattctcagaaactgctgcgtgatgtgtgcgatcaactctcagagtttaacttttcttttcattcagcggtttggaaacactctgtttgtaaagtctgcacgtggatattttgaccacttagaggccttcgttggaaacgggttttcttcatgtaaggctagacagaagaattcccagtaacttccttgtgttgtgtacattcaactcacagagttgaacgttcccttagacagagcagatttgaaacactctttttgtgcaattggcaaatggagatttcaagcgctttaaggtcaatggcagaaaaggaaatattcttcgtttcaaaactagacagaatcattcccacaaactgcgttgtgatgtgttcgttcaactcacagaagtttaacctttctgttcatagagcagttaggaaacactctgtttgtaaagtctgcaagtggatattcagacctccttgaggccttcgttggaaacgggatttcttcatattctgctagacagaagaattctcagaatcttccttctgttgtgtgtattcaactcacagagttgaacgttcctttacacagagcagacttgaaacactctttttgtggaatttgcaagtggagatttcagccgctttgaggtcccatggtagaaaaggaaatatcttcgtataaaaactagacagatagattctcagaaactcctttgtgatgtgtgcgttcaactcacagagtttaacctttcttttcatagagcagttaggaaacactctgtttgtaaagtctgcaagtggatattcagacctctttgaggccttcgttggaaacgggtttttttcatataaggctagacagaagaattctcagtaacttccttgtgttgtgtgtattcaactgacagagttgaactttcatttagagagagcagatttgaaacagtgtttttgtggaatttgcaagtggagatttcaagcgctttggggccaaaggcagaaaaggaaatatcttcgtataaaaactagacagaatcattctcagaaactgctgcgtgatgtgtgcgttcaactcacagagtttaagttttcttttcattcagcggtttggaaacactctgtttgtaaagtctgcacgtggatattttgaccacttagaggccttcgttggaaacgggattttttcatgtaaggctagacagaagaattcccagtaacttccttgtgttgtgtatattcaactcacagagttgaacgttcccttagacagagcagatttgaaacactctttttgtgcaattggcaagtggagatttcaagcgctttaaggtcaatggccgaaaaggaaatatcttcgtttcaaaactagacagaatcattcccacaaactgcgttgtgatgtgttcgttcaactcacagagtttaacgtttattttcatagagccgttaggaaacactctgtttgtaaactctgcaagtggatattcagacctctttgaggccttcgttggaaacgggatttcttcatattctgctagacagaagaattctcagtaacttccttgtgttgtgtgtattcaactcacagagttgaacgatcctttacacagagcagacttgaaacactctttttgtggaatttgcaagtggagatttcagccgctttgaggtcaatagtagaaaacgaaatatcttcgtagaaaaactagacaaaatgattctcagaaacttctttgtgatgtgtgcgttcaactcacagagtttaacctttcttttcatagagcagttaggaaacactctgtttgtaaagtctgcaagtggatattcagacctctttgaggccttctttggaaacgggtttttttcatataaggctagacagaataattctcagaatcttccttgtgttgtgtgtattcaactgacagagttgaactttcatttagagagagcagatttgaaacactgtttttgtggaatttgcaagtggagatttcaagcgctttggggccaaaggcagaaaaggaaatatcttcgtataaaaactagacagaatgattctcagaaactcctttgtgatgtgtctgttcaactcacagagtttaacttttcttttcattcagcggtttggatacactctgtttgtaaagtctgcacgtggatattttgaccacttagaggccttcgttggaaacgggttttttgaatgtaaggctagacagaagaattcccagtaacttccttgtgttgtctacattcaactcacagagttgaacgttcccttagacagaacagatttgaaacactctttttgtgcaattggcaagtggtgatttcagccgctttgaggtcaatggtagaaaaggaaatatcttcgtataaaaactagacagaatcattcccacaaactgcgttgtgatgtgttcgttcaactcacagagtttaacctttcttttcatagagcagtgaggaaacagtctgtttgtcaattctgtaagtggatattctgacatcttgtggccttagttggaaacgggatttcttcatattctgctagacagaagaattcttagaaacttccttgtgttgtgtgttttcaactcacagagttgaacgatcctttacacagagcagacttgaaacactccttttgtggaatttgcaagtggagatttcagccgctttgaggtcaatggtagaataggaaatatcttcctatagaaagtagacagaatgattctcagaaactcctttgtgatgtgtgcgttcaactcacagagtttaacctttcttttcatagagcagttaggaaacactctgtttgtaaagtctgcaagtggatattcagacctccctgaggccttcgttggaaacgggatttcttcatattctgctacacagaagaattcccagtaacttccttgtgttgtgtgtgttcaactcacagagttgaactttcatttacacagagcagatttgaaacactcgttttgtggaatttgcaagtggagatttcaagcgctttgaggccaaaggcagaaaaggaaatatcttcgtataaaaactagacagaatcattctcagaaactgctctgtgatgtgtgcgttcaactctcagagtttaacttttcttttcatttagcagtttggaaacactctgtttgtaaagtctgcacgtggataatttgaccacttagaggccttcgttggaaacgggtttttttcatgtaaggctagacagaagaattccaagtaacttccttgtgttgtgtacattcaactcacagagttgaacgttcccttagacagagcagatttgaaacactctttttgtgcaattggcaaatgtagatttcaagcgctttaaggtcaatggcagaaaaggaaatatcttcgtttcaaaactagacagaatcattcccacaaactgcgttgtgatgtgttcgttcagctcacagagtttaacctttcttttcatagagcagttaggaaacagtctgtttgtcaattctgtaagtggatattctgacatcttgtggccttcgttggaaacgggatttcttcatattctgctagacagaataattctcagtaaattccttgtgctgtgtgtattcaactcacagagttgaacgatcctttacagagagcagacttgaaacactctttttgtggaatttgcaagtggagatttcagccgcttggaggtcaatggtagaataggaaatatcttcctatagaaactagacagaatgattctcagaaactcctttgtgatgtgtgcgttcaactcacagagtttaacctttcttctcatagagcagttaggaaacactctgtttataaaggctgcaagtggatattcagaaccctttgaggcgttcgttggaaacgggatttcttcatattatgctagacagaagaattcccagtaacttccttgtgttgtgtgtgtttaactcacagagttgaactttcatttacacagagcagatttgaaacactctttttgtggaatttgcaggtggagatttcaagcgctttgaggccaaaggcagaaaaggaaatatcttcgtataaaaactagacagaatcattctcagaaactgctctgcgatgtgtgggttcaactctcagagtttaacttttcttttcattcagcagtttggaaacactctgtttgtaaagtctgcacgtggatattttgaccacttagaggccttcgttggaaacgggtttttttcctgtaaggctagacagaagaattcccagtaactttccttgtgttgtgtgcattcaactcacagagatgaacgttcgcttagacagagcagatttgaaacactctatttgtgcaatttgcaagtgtagatttcaagcgctttaaggtcaatggcagaaaaggaaatatcttcgtttcaaaactagacagaatcattcccacaaactgcgttgtgatgtgttcgttcaactcacagagtttaacctttctgttcatagagcagttaggaaacactctgtttgtaaagtctgtaagtggatattctgacatcttgtggccttcgttggaaacgtgatttcttcatattctgctagacagaagaattctcagaatcttccttgtgttgtgtgtattcaactcacagagttgaacgatcctttacacagagcagacttgaaacactctttttgtggaatttgcaagtggagatttcagccgctttgaggtccatggtagaaaacgaaatatcttcgtataaaaactagacagaatgattctcagaaactcctttgtgatgtgtgcgtccaagtcacagagtttaacctttcttttcatagagcagttaggaaacactctgtttgtaaagtctgcaagtggatattcagacctctttgaggccttcgttggaaacgggatttcttcatattctgctagacagaagaattctcagaatcttccttgtgttgtgtgtattcaactcacagagttgaacgatggtttacacagagcagatttgaaacactctttttgtggaatctgcaagtggagatttcagccgctttgaggtcaatggtagaaaaggaaatatcttcgtataaaaactagacagaatgattctcagaaactcctttgtgatgtgtgcgttcaactcacagagtttaacctttcttttaatagagcatttaggaaacactctgtttgtaaagtctgcaagtggataatcagacctctttgaggccttcgttagaaacgggatttcttcatattctgctagacagaagaattcccaataacttccttgtgttgtgtgtgttcaactcacagagttgaactttcatttacacagagcagatttgaaacactctttttgtggaatttgcaaatggagatttcaagcgctttgaggccaaaggcagaaaaggaaatatcttcgtatacaaaatacacagaatcattctcagaaactgctgcgtgatgtgtgcgttcaactctcagagtttaacttttcttttcattcagcggtttggaaacactctgtttgtaaagtctgcacgtggatattttgaccacttagagaccttcgttggaaacgggtttttttcatgtaaggctagacagaagaattcccagtaacttccttgtgttgtgcgcattcaactcacagagttgaacgttcccttagacagagcagatttgaaacagcctatttgtgcaatttgcaagtgtacatttcaagcactttaaggtcaacggcagaaaaggaaatatcttcctttcaaaactagacagaatcattcccacaaactgcgttgtgatgtgttcgttcaactcacagagtttaacctttcttttcatagagcagttaggaaacagtctgtttgtaaattctgtaagtggatattctgacatcttgtggccttcgttggaaaagggatttcttcatattctgctagacagaagaattctcagtaacttccttgtgttgtgtgtattcaactcacagagttgaacgatcctttacacagagcagacttgaaacactctttttgtggaatttgcaagtggagatttcagccgctgtgaggtcaatagtagaaaaggaaatatcttcgtagaaaaactagacagaatgattctcagaaactcctttgtgatgtgtgtgttcaactcacagagtttaacctttcttttcatagagcagttaggaaacactctgtttgtaatgtctgcaagtggatattcagacctctttgaggacttcgttggaaacgggtttttttcatataaggctagacagaagaattcccaataacttccttgtgttgtgtgtgttcaactcacagagttgaactttcatttacacagagcagatttgaaacactctttttgtggaatttgcaaatggagatttcaagcgctttgaggccaaaggcagaaaaggaaatatcttcgtataaaaactacacagaatcattctcagaaactgctctgcgatgtgtgcgttcaactctcagagtttaacttttcttttgattcagcagtttggaaacactctgtttgtaaagtctgcacgtggatattttgaccacttagaggccttcgttggaaacgggtttctttcctgtaaggctagacagaagaattcccagtaacttccttgtgttgtgtaaattcaactcacagagttgaacgttcccttagacagagcagatttgaaacactctttttgtgcaattggcaagtggagatttcaagcgctttaaggtcaatggcagaaaaggaaatatcttcgtttcaaaactagacagaatcattaccacaaactgcgttgtgatgtgttcgttcatctcacagagtttaacctttcttttcatagagcagttaggaaacagtctgtttgtaaattctgtaagtggatattctgacatcttgtggccttcgttggaaacgggatttcttcatattctgctagacagaagaatactcagtaacttccttgtgttgtgtgtattcaactcacagagttgaacgatcctttacacagagcagacttgaaacactctttttgtggaatttgcaagtggagatttcagccgctttgaggtcaatagtagaaaaggaaatatcttcctagaaaaactagacagaatgattctcagaaactcctttgtgatgtgtgcgttcaactcacagagtttaacatttcttttcatagagcagttaggaaacactctgtttgtaaagtctgcaagtggatattcagacctctttgaggccttctttggaaacgggtttttttcatataaggctagacagaagaattcccagtaacttccttttgttgtgtgtgttcaactcacagagttgaactttcacttacacagagcagatttgaaacactctttttgtggaatttgcaagtggagatttcaagcgctttgaggccaaaggcagaaaaggaaatatcttcgtataaaaactagacagaatcattctcagaaaccgctctgtgatgtgtgtgttcaactctcagagtttaacttttctttccattcagcagtttggaaacactctgtttgtaaagtctgcacgtggatattttgaccacttagaggtcttcgttggaaacgggtttttttcatgtaaggctagacagaagaattcccagtaacttccttgtgttgtgtgcattctactcagagagttgaacgttcccttagacagagcagatttgaaacactctatttgtgcaaattgcaagtgtagatttcaagcgctttaaggtcaatggcagaaaagggaatatcttcgtttcaaaactagacagaatcattccctcaaactgcgttgtgatgtgttcgttcaactcacagagtttaacctttctgttcatagagcagttaggaaactctctgtttgtaaagtctgtaagtggatattctgacatcttgtggccttcgttggaaacgggatttcttcatattctgctagacagaagaattctcagtaacttccttgtgttgtgtgtattcaactcacagagttgaacgattctttacacagagcagacttgaaacactctttttgtggaatttgcaagtggagatttcagccgctttgaggtcaatggtagaaaaggaaatatcttcgtataaagagtagacagaatgattctcataaactcctttgtgatgtgtgcgttcaactcacagagtttaacttttcttttcatagagcagttaggaaacactctgtttgtaaagtctgcaagtggatattcagacctctttgaggccttcgttggaaacgggatttcttcatattttgctagacagaagaattctcagtaacttccttgtgtggtgtgtattcaactgacagagttgaactttcatttagagagagcagatttgaaacactgtttttgtggaatttgcaagtggagatttcaagcgctttggggccaaaggcagaaaaggaaatatcttcgtataaaaagtagacagaatcattctcagaaaatcctctgtgatgtgtgcgttcaactctcagagtttaacttttcttttcattcagcagtttggaaacactctgtttgtaaagtctgcacgtggatattttgaccacttagaggccttcgttggaaacgggttttttcatgtaagggtagacagaagaaatcccagtaacttccttgtgttgtgtgcattcaactcacagagttgaacgttcccttagacagagcagatttgaaacactctatttgtgcaatttgcaagtgtagatttcaagtgctttaaggtcaacggcagaaaaggaaatatcttcgtttcaaaactagacagaatcattctcagaaactgctctgcgatgtgtgcgttcaactctcagagtttaacttttcttttcattcagcagtgtggaaaaactctgtttgttaagtctgcacgtggatattttgaccacttagaggccttcgttggaaacgggtttttttcctgtaaggctagacagaagaattctcagtaacttccttgtgctgtgtgtattcaactcacagagttgaacgatcctttacagagagcagactttaaacactctttttgtggaatttgcaagtggagacttcagccgctttgaggtcaatggtagaaaaggaaatatcttcgtataaagactagacagaaagattctcagaaactcctttgtgatgtgtgcgttcaactcacagagtttaacctttcttttcatagagcagttaggaaacactctgtttctaaagtctgcaagtggatattcagacctctttgaggccttcgttggaaacgggtttttttcatataaggctagacagaagaattcccagtaacttccatgtgttgtgtgtgttcaactcagagagttgaactttcatttacactgagcagatttgaaacactctttttgtagaatttgcaaatggagatttcaagcgctttgaggccagaggcagaaaaggaaatatcttcgtataaaaactagacagaatcattctcagaaactgctctgcgatgtgtgcgttcaactctcagagtttaacttttcttttcattcagcagtttggaaacactctgtttgtaaagtctgcacgtggataatttgaccacttagaggtcttcgttggaaacgggtttttttcatgtaaggctagacagaagaattcccagtaacttccttgtgttgtgtgcattcaactcacagagttgaacgttcccttagacagagcagatttgaaacactctatttgtgcaatttgcaagtgtagttttcaagctctttaaggtcaacggcagaaaaggaaatatcttggtttcaaaactagacagaatcattcccacaaactgcgttgtgatgttttcgttcaactcacagagtttaacctttctgttcatagagtagttaggaaacactctgtttgtaaagtctgtaagtggatattctgacatcttgtggccttcgttggaaacgggatttcttcatattctgctagacagaagaattctcagtaacttccttgtgttgtgtgtattcaactcacagagttgaacgatcctttacacagagcggacttgaaacactctttttgtggaatttgcaagtggagattttagccgatttgaggtcaatggtagaataggaaatatcttcctatagaaacaagacagatagattctcagaaactcctttgtgatgtgtgcgttcaactcacagagtttaacctttcttttcatagagcagttaggaaacactctgtttgtaaagtctgcaagtggatattcagacctctttggggccttcgttggaaacgggtttttttcatataaggctagacagaagaattctcagtaacttccttgtgttgtgtgtattcaactgacagagttgaactttcatttagagagagcagatgtgaaacactgtttttgtggaatttgcaagtggagatttcaagcgctttggggccaaaggcagaaaaggaaatatcttcgtataaaaactagacagaatcattctcagaaactgctgcgtgatgtgtgcgttcaactctcagagtttaacttttcttttcattcagcggtttggaaacactctgtttgtaaagtctgcacgtggatattttgaccacttagaggccttcgttggaatcgggttttttgcatgtaaggctagacagaagaattcttagtaacttccttgtgttgtgtgtattcaactcacagagttgaacgatcctttacacagagcagacttgtaacactctttttgtggaatttgcaagtggagatttcagccgctttgaagtcaaaggtagaaaaggaaatatcttcctataaaaactagacagaatcattcccacaaactgcgttgtgatgtgttcgttcaactcacagagtttaacctttctgttcatagagcagttaggaaacactctgtttgtaaagtctgtaagtggatattcagacatcttgtggccttcgttggaaacgggatttgttcatattctgctagacagaataattctcagtaacttccttgtgttgtgtgtattcaactcacagtagttgaaggatcctttacagacagcaggcttgaaacactctttttgtcgaatttgcaagtggagatttcagccgctttgtggtcaatggtagaatacgaaacatcttcttatagaaactagacaaaatgattctcagaaactcctttgtgatgtgtgcgatcaactcacagagtttaacctttcttttcatagagcagttaggaaacactctgtttgtaaagtctgcaagtggatattcagacctctttgaggccttcgttggaaacgggttgttttcatataaggctagacagaagaattcccagtaacttccttgtgttgtgtgtgttcaactcacagagttgaactttcatttacacagagcagattggaaacactctttttgtggaatttgcaagtggagatttcaagcgctttgaggccaaaggctgaaaaggaaatatcttcgtataaaaactagacagaatcattctcagaaactactctgcgatgtttgcgttcaactctcagagtttaacttttcttttcattcagcagtttggaaacactctgtttgtaaagtctgcacatggatattttgaccacttagaggccttcgttggaaacgggtttctttcctgtaaggctagacagaagaattcccagtaacttccttgtgttgtgtgcattcaactcacagagttgaacgttcccttagacagagcagatttgaaacactctatttgtacaatttgcaagtgtagatttcaagcgctttaaggtcaacggcagaaaaggaaatatcttcgtttcaaaactagacagaatcattcccacaaactgcattgtgatgtgttcgttcaactcacagagtttaacctttctgttcatagagcagttaggaaacactctgtttgtaaagtctgcaagtgcatattcagacctctttgaggccttcgttggaaacgttatttcttcatattatgctagacagaagaattctcagtaacttccttgtgttgtgtgtattcaactcacagagttgaacgatcctttaaacagagcagacttgaaacactctttttgtggaatttgcaagtggagatttcagccgctttgaggtcaatggtagaaaaggaaatatcttcgtatagaaacaagacagaatgattctcagaaactcctttgtgatgtgtgcgttcaactcacagagtttaacctttctttgcatagagcacttaggaaacactctgtttgtaaagtctgcaagtggatattcagacctctttgaggccttcgttggaaacgggtttttttcatataaggctagacagaagaattctcagtaacttccttgtgttgtgtgtattcaactgacagagttgaactttcatttagagagagcagatttgaaatactgtttttgtggaatttgcaagtggagatttcaaacgctttggggccaaaggcagaaaaggaaatatcttcgtatgaaaactagacagaatcattctcagaaactgctgtgtgatgtgtgcgttcaactctcagagtttaacttttcttttcattcagcggtttggaaacactctgtttgtaaagtctgcacgtggatattttgaccacttagagcccttcgttggaaacgggattttttcatgtaaggctagacagaagaattcccagtaacttccttgtgttgtgtgcattcaactcacagagttgaacgttctcttagacagagcagatttgaaacactctatttgtgcaatttgcaagtgtagatttcaagcgctttaaggtcaatggcagaaaaggaaatatcttcgtttcaaaactagacagaatcattcccacaaactgcgttgtgatgtgttcgttcaactcacagagtttaacctttctgttcatagagcagttaggaaacacgctctttgtaaagtccgtaagtggatattctgacatcttctggccttcgttggaaacgggatttcttcatattccgctagacagaagaattctcagtaacttccttgtgttgtgtgtattcaactcacagatttgaacgatcctttacacagagcagacttgaaacactctttttgtggaatttgcaagtggagatttcagccgctttgaggtcaatggtagaaaaggaaatatcttcgtataaaaactagacagaatgattctcagaaacttctttgtgatgtgtgcgttcaactcacagagtttaacctttctattcatagagcagttaggaaacactctgtttgtaaactctgcaagtggatattcagacctctttgaggccttcgttggaaacgggatttcttcatactgtgctagacagaagaattctcagtaacttccttgtgttgtgtgtattccactcacagagttgaactttcatttagagagagcagatttgcaacactgtttttgtggaatttgcaaatggagatttcaagcgctttggggccaaaggcagaaaaggaaatatcttcgtataaaaactagacagaatcattctcagaaactgctctgcgctgtgtgcgttcaactctcagagtttaacttttcttttcattcagcagtttggaaacactctgtttgtaaagtctgcacgtggataacttgaccacttagaggccttcgttggaaacgggtttttttcctgtaaggctagacagaagaattcccagtaacttccttgtgttgtgtgcattcaactcacagagttgaacgttcccttagacagagcagatttgaaacactctatttgtgcaatttgcaagtgtagttttcaagctctttaaggtcaacggcagaaaaggaaatatcttcgtttcaaaactagacagaatcattcccacaaactgcgttgtgatgtgttcgttcaactcacagagtttaacctctctgttcatagagcagttaggaaacactctgtttgtaaagtctgtaagtggatattctgacatcttgtggccttcgttggaaacgggatttcttcatattctgctagacagaagaattctcagaaacttcctggtgttgtgtgttttcaactcacagagttcaacgatcctttacacagagtagacttgaaacactctttttgtggaattggcaagtggagatttcagccgctttgaggtaaagggtagaaaaggaaatatcttcgtacaaaaactagacagaatgattctcagaaactcctttgtgatgtgtgcgttcaactcacggagtttaccctttcttttcatagagcagttaggaaacactctgtttgtaaagtctgcaagtggatattcagacatccttgaggctttcgttggaaacgggatttcttcatattctgctagaaagaagaattcccagtaacttaccttgtgttgtgtgtgttgaactcacagagttgaactttcatttacacagagcagatttgaaacactctttttgtggaatttgcaagtggagatttcaagcgctttcaggccaaaggcagaaaaggaaatatcttcgtataaaaactagacagaatcattctcagcaaactgctctgcgatgtgtgcattcaactctcagagtttaacttttcttttcattcagcagtttggaaacactctgtttgtaaagtctgcacgtggataacttgaccacttagaggccttcgttggaaacgggtttttttcatgtaaggctagacagaagaattcccagtaacttccttgtgttgtgtacattcaactcacagagttgaacgttcccttagacagagcagatttgaaacactctttttgtgcaattggcaagtggagatttcaagcgctttaaggtcaatggcagaaaaggaaatattttcgtttcaaaactagacagaatcattcccacaaactgcgttgtgatgtgttggtacaactcacagagtttaacctttctgttcatagagcagttaggaaacactctgtttgtaaagtctgtaagtggatattcagacatcctgtggccttcgttggaaacgggatttcttcatattctgctagacagaagaattctcagtaacttccttgtgttgtgtgtattcaactcacagagttcaacgatcctttacacagagcagtcttgaaacactctttttgtggaatttgcaagtggagatttctgacgctttgaggtcaatggtagaataggaaatatcttcctatagaaactagacagaatgattctcagaaactcctttgagatgtgtgtgttcaactcacagagtttaacctttcttttcatagagcagttaagaatcactctgtttgtaaagtctgcaagtggatattcagacctctttgaggccttcgttggaaacgggtttttttcatataaggctagacagaagaattctcagaaacttccttgtgttgtgtgttttcaactcacagagttgaacgatcctttacacagagcagacttgaaactctctttttgtggaatttgcaattggagatttcagccgctttgaggtcaatggtagaataggaaataccttcctatagaaactagacagaatgattctcagaaactcctttgtgatgtgtgcgttgaactcacagagtttaacctttcttttcatagagcagttaggaaacactctgtttgtaaagtctgcaagtggatattcagacatctttgaggctttcgttggaaacgggatttcttcatattctgctagacagaagaattcccagtaacttccttgtgttgtgtgtgttcaactcacagagttgaactttcatttacacagagcagatttgaaacactctttttgtggaatttgcaagtggagatttcaagcgctttgaggccaaaggcagaaaaggaaataccttcgtataaaaactagacagaatcattctcagaaactgctctgcgatgtgtgcgttcaactctcagagtttaacttttcttttcattcagcagtttggaaacactctgtttgtaaagtctgcacgtggatattttgaccacttagaggccttcgttggaaacgggtttttttcctgtaatgctagacagaagaattcccagtaacttccttgtgttgtgtgaattcaactcacagagttgaacgttcccttagacagagcagatttgaaacactctatttgtgcaatttgcaagtgtagatttcaagcgctttaaggtcaacgccagaaaaggaaatatcttcatttcaaaactagacagaatcattcccacaaactgcgttgtgatgtgttcgttcaactcacagagtttaacctttctgttcatagagcagttaggaaacactctgtttgtaaagtctgtaagtggatattcagacatcttgtggccttcgttggaaacaggatttcttcatattctgctagacagaagaattctcagaatcttccttgtgttgtgtgtattcaactcacacggttgaacgatcctttacacagagcagatttgaaacactcatttggtggaatttgcaagtggagatttcagccgctttgaggtcaatggtagaaaaggaaatatcttcgtataacaactagacagaatgattctcagaaactcctttgtgatgtgtgcgttcaactcacagagtttaacctttcttttcatagagcagttaggaaacactctgtttgtaaagtctgcaagtggatattcagacctccttgaggtcttcgttggaaacgggtttttttcatataaggctagacagaagaattcccagtaacttccttgtgttgtgtgtgttcaactcacagagttgaactttcatttacacagagcagatttgaaacactctttttgtggaatatgtaagtggagatttcaagcgctttgaggccaaaggcagaaaaggaaatatcttcgtttcaaaactagacagaatcattctcagaaactgctgcgtgatgtgtgcgttcaactctcagagtttaacttttcttttcattcagcggtttggaaacactctgtttgtaacatctgtacgtggatattttgaccacttagaggccttcgttggaaacgggtttttttcatgtaaggctagacagaagaattcccagtaacttccttgtgttgtgtgcattcaactcacagagttgaacgttcccttagacagagcagatttgaaacactctatttgagcaatttgcaagtgtagttttcaagctcttttaggtcaacggcagaaaaggaaatatcttggtttcaaaactagacagaatcattcccacaaactgcgttgtgatgtgttcgttcaactcacagcgttttacctttctgttcatagagcagttaggaaacactctgtttgtcaagtctgtaagtggatattctgacatcttgtggccttcgttggaaatgggatttcttcatattctgctagacagaagaattctcagtaacttccttgtgttgtgtgtattcaactcacagagttgcacgatcctttacacagagcagacttgaaacaatctttttgtggaatttgcaagtggagatttcagccgctttgagttcaatggtagaataggaaatatcttcctatagaaactagacagaatcattcccacaaactgcgttgtgatgtgttcgttcaactcacagagtttaacctttctgttcatagagcagttaggaaacaccctgtttgtaaagtctgcaagtggatattcagacctctttgaggccttcgttggaaacgggatttcttcatattatgctagacagaagaattctcagtaacttccttgtgttgtgtgtattcaactgacagagttgaactatcatttagagagagcagatttgaaacactgtttttgtggaatttgcaagtggagatttcaagcgctttggggccaaaggcagaaaaggaaatatcttcgtataaaaactagacagaatcattctcagaaactgctctgcgatgtgtgcgttcaactctcagagtttaacttttcttttcattcagcagtttggaaacactctgtttgtaaagtctgcacgtggatattttgaccacttagaggccttcgttggaaacgggtttttttcctgtaaggctaaacagaagaattcccagtaacttccttgtgttgtgtacattcaactcacagagttgaacgttcacttagacagagcagatttgaaacactctttttgtgcaattggcaaatggagatttcaagcgctttaaggtcaatggcagaaaaggaaatatcttcgtttcaaaactagacagaatcattcccacaaactgcgttgtgatgtgttcgttcaactcacagagtttaacctttcttttcatagagcagttaggaaacagtctgtttgtcaattctgtaagtggatattctgacatcttgtgaccttcgttggaaacgggatttcttcatattctgctagacaaaagaattctcagtaacttccttgtgttgtgtttattcaactcacagagttgaatgatcctttacacagagcagacttgaaacactctttttgtggaatttgcaagtggagattacagccgctttgaggtcaatggtagaaaagtaaatatcttcgtataaagactagacagaatgattctcagaaactcctttgtgatgtgtgggttcaactcacagagtttaacctttctttttcatagagcagttaggaaacactctgtttgtaaagtctgcaagtggatattcagacctcgttgaggccttcgttggaaacgggatttcttcatattctgctagacagaagaattctcagtaacttccttgtgttgtgtttattcaactcacagagttgaatgatcctttacacagagcagacttgaaacactctttttgtggaatttgcaagtggagatttcagccgctttgcggtcaatggtagaaaagtaaatatcttcgtataaagactagacagaatcatgctcagaaactgctctgcgatgtgtgcgttcaactctcagagtttaacttttcttttcattcagcagtttggaaacactctgtttgtaaagtctgcacgtggataatttgaccacttagaggccttcgttggaaacgggtttttttcatgtaaggctagacagaagaattcccagtaacttccttgtgttgtgtgcattcaactcacagagttgaacgttccctttgacagagcagatttgaaacactgtatttgtgcaatttgcaagtgtagatttcaagcgctttaaggtcaatggcagaaaaggaaatttcttcgtttcaaaactagacagaatcattcccacaaactgcgttgtgatgtgctcgttcatctcacagagtttaacctttcttttcatagagcagttaggaaacactctgtttgtaaattctgtaagtggatattctgacatcttgtggccttcgctggaaacgggatttcttcatattctgctagacagaagaattctcagtaacttcccttgtgttgtgtgtattcaactcacagagttgaacgatcctttacacagagcagacttgaaacactctttttgtggaatttgcaagtggagatttcagccgctttgaggtcaatggtagaataggaaatatcttcctatagaaagtagacagaatgattctcagaaactcctttgtgatgtgtgcgttcaactcacagagtttaacctttcttttcatagagcagttaggaaacactctgtaaagtctgcaagtggatattcagacatctttgaggccttcgttggaaacgggatttcttcatattatgctagacagaagaattctcagtaacttccttgtgttgtgtgtattcaactgacagagttgaactttcatttagagagagcagatttgaaacactgtttttgtggaatttgcaagtggagatttcaatcgctttggggccaaaggcagaaaaggaaatatcttcgtataaaaactagacagaatcattctcaaaaactgctgcgtgatgtttgcgttcaactctcagagtttaacttttcttttcattcagcggtttggaaacactctgtttgtaaagtctgcacgtggatattttgaccacttagaggccttcgttggaaacgggtttttttcatgtaaggctagacagaagaattcccagtaacttccttgtgttgtgtgcattcaactcacagagttgaacgttcccttagacagagcagatttgaaacactctatttgtgcaatttgcaagtgtagatttcaagcgctttaaggtcaacggccgaaaaggaaatatcttcgtttcaaaactagacagaatcattcccacaaactgcgttgtgatgtgttcgttcaactcacagagtttaacctttctgttcatagagcagttaggaaacactctgtaaagtctgtaagtggatattctgacatcttgtggccttcgttggaaacgggatttcttcatattctgctagacagaagaattcccagtaacttccttgtgttgtgtgtgttcaactcacagagttgaactttcatttacacagagcagatttgaaacaccctttttgtggaatttgcaaatggagatttcagccgcgttgaggtcaatggtagaaaaggaaatatcttcgtttcaaaactagacagaatgattctcagaaactcctttgtgatgtgtgccttcaactcacagagttcaacctttctttttatagagcagttgggaaacactctgtttgtaaagtctgcatgtgcatattcagagttctttgaggccttcgttggaagcgggatttcttcatattctgctagacagaagaattctcagtaacttccttgtgttgtgtgtattcaactcacagagttgaacgatcctttacacagagcagacttgaaacactctttttgtggaatttgcaattggagatttcagccgctttgaggtcaatggtagaataggaaatatcttcctatagaaactagacagaatcattctcagaaactgctctgcgatgtgtgcgttcaaatctcagagtttaacttttcttttcattcaacagtttgaaaacactctgtttgtaaagactgcacgtggatattttgaccacttagaggccttcgttggaaacgggtttttttcctgtaaggctagacagaagaattcccaggaacttccttgtgttgtgtacattcaactcacagagttgaacgttcccttagacagagcagatttgaaacactctttttgtgcaattggcaagtggtgatttcagcctctttgaggtcaatggtagaaaaggaaatatcttcgtataaaaactagacagaatcattcccacaaactgcgttgtgatgtgttcgttcaactcacagagtttaacatttctgttcatagagcagttaggaaacactctgtttgtaaagtctgtaagtggatattctgacatcttgtggccttcgttggaaacgggatttcttcatattctgctagacagaataattctcagtaacttccttgtgttgtgtgtactcaactcacagagttgaacgatcctttacagagagcagacttgaaacactctttttgtggaatttgcaagtggagatttcagccgctttgaggtcaatggtagaaaaggaaatatctttgtataaagactagacagaatgattctcagaaactcctttgtgatgtgtgcgttcaactcacagagtttaacctttcttttcatagagcagttaggaaacactctggttgtaaagtctgcaagtggatattcagacctctttgaggccttcgttggaaacgggatttcttcatattctgctagacagaagaattcccagtaacttccttgtgttgtgtgtattcaactcacagagttgaacgatcctttacacagagcagtcttgaaacactctttttgtggaatttgcaagtggagatttctgccggtttgaggtcaatggtagaataggaaaaaacttcctatagaaactagacagaatgattctcagaaactgctgcgtgatgtgtgcgttcaactctcagagtttaacttttcttttcattcagcggtttggaaacactctgtttgtaaagtctgcacgtggatattttgaccacttagaggccttcgttggaaacgggtttttttcatgtaaggctagacagaagaattcccagtaacttccttgtgttgtgtacattcaactcacagagttgaacgttcccttagacacagcagatttgaaacactctttttgtgcaattggcaagtggagatttcaagcgctttaaggtcaatggcagaaaaggaaatatcttcgtttcaaaactagacagaatcattcccacaaactgcgttgtgatgtgttcgttcaactcacagagtttaacctttcttttcatagagcagttaggagacactctgtttgtaaagtctgcaagtggatattcagacctctttgaggccttcattggaaacgggatttcttcatattatgatacacagaagaattctcagtaacttccttgtgttttgtgtattcaactcacagagttgaacgatcctttacacagagcagacttgaaacactctttttgcggaatttgcaagtggagatttcagccgctttgaggtcaatggtagaataggaaatatcttcctatagaaactagacagaatgattctcagaaactcctttgtgatgtgtgcgttcaactcacagagttcaacctttcttttcatagagcagttgggaaacactctgtttgtaaagtctgcaagtggatattcagacttctttgaggccttcgttggaaacgggatttcttcatattatgctagacagaagaattctcagtaacttcttgtgttgtgtgtattcaactgacagagttgaactttcatttagacagatcagatttgaaacactgttttcgtggaatttgcaagtggaggtttcaagcgctttgaggccaaaggcagaaaaggaaatatcttcctataaaaaccagacagaatcattctcagaaactgctctgcgatgtgtgcgttcaactctcagagtttaactttgcttttcattcagcagtttggaaacactctgtttgtaaagtctgcacgtggataattagaccacttagaggccttcgttggaaacgggtttttttcatgtaaggctagacagaagaattcccagtaacttccttgtgttgtgtgcattcaactcacagagttgaacgttcccttagacagagcagatttgaaacactctatttctgcaatttgcaagtgtagatttcaagcgctttaaggtcaatggcagaaaaggaaatatcttcgtttcaaaactagacagaatcattcccacaaactgcgttgtgatgtgttcgttcaactcacagagtttaacctttcttttcatagagcagttaggaaacagtctgtttgtaaattctgtaagtggatattctgacatcttttggccttcgttggaaacgggatttcttcatattctgctagacagaagaattctcagaatcttccttgtgttgtgtgtattccactcacagagttgaacgatggtttacacagagcagatttgaaacactctttgtgtggaatttgcaagtggagatttcagccgctttgaggtcaatggtagaaaaggaaatatcttcgtataaaaactagacagaatgattctcagaaactcctttgtgatgtgtgtgttcaactcacagagtttaacctttcttttcatagagcagttagtaaacactctgtttataaagtctgcaaatggatattcagacccctttgaggccttcgttggaaacgggatttcttcatattatgctagacagaagaattcccagtaacttccttgtgttgtgtgtgttcaactcacagagttgaactttgatttacacagagcagatttgaaacactctttttgtggaatttgcaagtggagatttcaagcgctttgtggccaaaggcagaaaaggaaatatcttcgtataaaaactagacagaatgattctcagaaactcctttgtgatgtgtgcgttcaactcacagagtttaacctttcttttcattcagcggtttggaaacactctgtttgtaaagtctgcacgtggatattcagacctctttgaggccttcgttggaaacgggtttttttcatgtaaggctagacagaagaattcccagtaacttccttgtgttgtgtgcattcaactcacagagttgaacgttcccttagacagagcagatttgaaacactctatttgtgcaatttgcaagtgtagttttcaagctctttaaggtcaacggcagaaaaggaaatatcttggtttcaaaactagacagaatgattctcagaaactcctctgtgatgtgtgcgttcaactcacagagtttaacctttcttttcatagagcagttaggaaacactctgtttgtaaagtctgcatgtggatattcagacctccttgaggccttctttggaaacgggatttcttcatattatgctagacagaggaattctcagtaacttccttgtgttgtgtgtattcaactcacagagttgaacgatgctttacacagagcagacttgaaacactctttttgtggaatttgcaagtggagatttcagccgctttgaggtcaatggtagaataggaagtatcttcctatagaaactagacagaatgattctcagaaactactttgtgatgtgtgcgttcaactcacagagtttaacctttcttttcatagagcagttaggaaacactctgtttgtaaagtctgcaagtggatattcagacctccttgaggccttctttggaaacgggatttcttcatattatgctagacagaagaatccccagtaacttcccttgtgttgtgtgtgttcaactcacagagttgaactttgatttacacagagcagatttgaaacactctttttgtggaatttgcaagtggagatttcaagcgctttggggccaaaggcagaaaaggaaatatcttcgtataaaaactagacagaatcattctcagaaactgctctgcgatgtgtgcgttcaattctcagagtttaacttttcttttcattcagcagtttggaaacactctgtttgtaaagtctgcacgtggatattttgaccacttagaggccttcgttggaaacgggtttttttcttgtaaggctagacagaagaattcctagtaacttccttgtgttgtgtacattcaactcacagagttgaacgttcccttagacagagcagatttgaaacactctttttgtgcaattggcaagtggtgatttcagccgctttgaggtcaatggtataaaaggaaatatcttcgtattaaaactagacagaatcattcccacaaactgcgttgtgatgtgttcgttcaactcacagagtttaacctttctgttcatagagcagttaggaaacactttgtttgtaaagtctgtaagtggatattctgacatcttgtggccttcgttggaaacgggatttcttcatattctgctagacagaagaattctcagtaacttccttgtgttgtgtgtattcaactcacagagttgaacgatcctttacacagagcagacttgaaacacactttttgtggaatttgcaagtggagatttcagccgttttgaggtcaatggtagaaaaggaaatatcttcgtataaagactagacagaatgattctcagaaactcctttgtgatgtgtgtgttcaactcacaaagtttaagctttcttttcatagagcagttagtaaacactctgtttataaagtctgcaagtggatattcagacccctttgaggccttcgttggaaaccggatttcttcatattatgctagacagaagaattcccagtaacttccttgtgttgtgtgtgttcaactcacagagttgaactttcatttacacagagcagatttgaaacactctttttgtggaatttgcaagtggagatttcaagcgctttgaggctaaaggcagaaaaggaaatatcttcgtataaaaactagacagaatcattctcagaaactgctctgcgatgtgtgcgttcaactctcagagtttaacttttcttttcattcagcagtttggaaacactctgtttgtaaagtctgcacgtggatattttgaccacttagaggccttcgttggaaacgggtttttttcctgtaagtctagacagaagaattcccagtaacttccttgtgttgtgtgcattcaactcacagagttgaacgttcccttagacagagcagatttgaaacactctatttgtgcaatttgcaagtgtagttttcaagctctttatggtcaacggcagaaaaggaaatatcttcgtttcaaaactagacagaatcattcccacaaactgcgttgtgatgtgttcgttcaactcacagagtttaacctttctgttcatagagcagttaggaaacactctgtttgtaaagtctgtaagtggatattctgacatcttatggccttcgttggaaacgggatttcttcatattctgctagacagaagaattctcaggaacttccttgtgttgtgtgtattcaactcacagagttgaacgatcctttacacagagcagacttgaaacactctttttgtggaatttgcaagtggagatttcagccgctttgagttcaatggtagaataggaaatatcttcctatagaaactacacagaatgattctcagaaactcctttgtgatgtgtgtgttcaactcacagagtttaacctttcttttcatagagcagttaggaaacactctgtttgtaaagtctgcatgtggatattttgacctctttgaggccttcgttggaaacgggttttttcatgtaaggatagacagaagaattcccagtaacttccttgggttgtgtgtgttcaactcacagagttgaactttcatttacacagagcagatttgaaaaactctttttgtggaatttgcaaatggagatttcaagcgctttgaggccaaaggcagaaaaggaaatatcttcgtataaaaactagacagaatcattctcagaaactgctctgtgatgtgtgcgttgaactctcagagtttaacttttcttttcattcagcagtttggaaacactctgtttgtaaagtctgcacgtggataatttgaccacttagaggccttcgttggaaacgggtttttttcatgtaaggctagagagaagaattcccagtaacttccttgtgttgtgtacattcaactcacagagttgaacgttcccttagacagagcagatttgaaatactctttttgtgcaattggcaagtggagatttcaagcgctttaaggtcaatggcagaaaaggaaatatcttcgtttcaaaactagacagaatcattcccacaaactgcgttgtgatgtgttcgttcaactcacagagtttaacctttctgttcatagagcagttaggaaacactctgtttgtaaagtctgtaagtggatattcagacctctttgaggccttcgttggaaacgggatttcttcatattctgctagacagaataattctcagtaacttccttgtgttgtgtgtattcaactcacagagttgaaggatcctttacagagagcaggcttgaaacactctttttgtggaatttgcaagtggaggtttcagccgctttgaggtcaatagtagaaaaggaaatatcttcctagaaaaactagacagaatgattctcagaatctcctttgtgatgtgtgcgttcaactcacagagtttaacctttcttttcatagagcagttaggaaacactctgtttgtaaagtctgcaagtggatattctgacctctttgaggccttcgttggaaacgggttttttcatataagactagacagaagaattctcagtaacttccttgtgttgtgtgtattcaactcacagagttgaacgatcctttacacagagcagacttgaaacactctttttgtggaatttgcaagtggagatttcagccgctttgaggtcaatggtagaaaaggaaatatcttcgtatatagactagacagaatgattctcagaaactcctttgtgatgtgtgtgttcaactcacagcagtttaacctttcttttcatagagcagttagtaaacactctgtttataaagtctgcaagtggatattcagacccctttgaggccttcgttggaaacgggaattcttcatattatgctagacagaagaattcccagtaactttccttgtgttgtgtgtgttcaactcacagagttgaactttcatttacacagagaagatttgaaacactctttttgtggaatttgcaagtggagatttcaagcgctttgaggccaaaggcagaaaaggaaatatcttcgtttcaaaactagacagaatcattctcagaagctgctgcgtgatgtgtgcgttcaactctcagagtttaacttttcttttcattcagcggtttggaaacactctgtttgtgaagtctgcacgtggatattttgaccacttagaggccttcgttggaaatgggttttttgcatgtaaggctagatagaagaattctcagtaacttccttgtgttgtgtgtattcaactcacagagttgaacgatcctttacacagagcagacttgtaacactctttttgtggaatttgcaagtggagatttcagccgctatgaagtcaaatgtagaaaaggaaatatcttcctataaaaactagacagaatcattcccacaaactgcgttgtgatgtgttcgttcaactcacagagtttaacctttctgttcatagagcagttaggaaacactctgtttgtaaagtctgtaagtggatattctgacatcttgtggccttcgttggaaacgggatttcttcatattctgctggacagaagaattctcagtaacttccttgtgttgtgtgtattcaactcacagagttgaacgatcctttacacagagcagacttgaaacgctctttttgtggaatttgcaagtggagatttcagccacgttgaggtcaatggtagaaaaggaaatatcttcgtataaaaactagacagaatgattctcagaaactcctttgtgatgtgtgctttcaactcacagagcttaacctttcttttcatagagcagttaggaaacactctgtttgtaaagtctgcaagtggatattcagacctctttgaggccttcgttggaaacgggtttttttcatataaggctagacagaagaattctcagtaacttccttgtgttgtgtgtattcaactcacagagttgaacgatcctttacacagagcagacttgaaacactctttttgtggaatttgcaagtggagatttcagccgctttgaggtcaatggtagaataggaaatatcttcctatagaagctagacagaatgattctcagaaactcctttgtgatgtgtgcgttcaactcacagagtttatcctttcttttcatagagcagttaggaaacactctgtttgtaaagtctgcatatggatattcagacatctttgaggccttcgttggaaacgggatttcttcatgttctgctagacagaagaattcccagtaacttccttgtgttgtgtgtgttcaactgacagagttgaactttcatttagacagagcagatttgaaacactctttttgtggaatttgcaattggagatttcaagcgctttgaggccaaaggcagaaaaggaaatatcttcgtataaaaactagacagaatcattctcagaaactgctgcgtgatgtgtgcgttcaactctcagactttaacttttcttttcattcagcggtttggaaacactgtgtttgtaaagtctgcacgtggatattttgaccacttagaggccttcgttggaaacgggtttttttcatgtaaggctagacagaagaattcccagtaacttccttgtgttcgtgtacattcaactcacagagttgaacgttcccttagacagagcagatttgaaacactctttttgtgcaattgacaaatggagatttcaagcgctttaaggtcaatggcagaaaaggaaatatcttcgtttcaaaactagacagaatcattctcagaaactgctctgcgatgtgtgcgttcaactctcagagtttaacttttcttttcattcagcagtttggaaacactctgtttgtaaagtctgcacgtggataacttgaccacttagaggccttcgttggaaacgggttttgttcatgtaaggctagacagaagaattctcaagtaacttccttgtgttgtgtgtattcaactcacagagttgaacgatcctttacacagagcagacttgtaacactctttttgtgtaatttgcaagtggagatttcagccgctttgaagtcaaaggtagaaaaggaaatatcttcctataaaaactagacagaatgattctcagaaactcctttgtgatgtgtgtgttcaactcacagagtttaacctttcttttcatagagcagttagaaaacactctgtttctaaagtctgcaagtggatattcagacccctttgaggccttcgttggaaacgggatttcttcatattatgctagacagaagaattcccagtaacttcccttgtgttgtgtgtgttcaactcacagagttgaactttcatttacacagagcagatttgaaacactctttttgtggaatttgcaaatggagatttcaagcgctttgaggccaaaggcagaaaaggaaatatcttcgtataaaaactagacagaatcattctcagaaactgctctgcgatgtgtgcgttcaactctcagagtttaacttttcttttcattcagaagtttggaaacactctgtttgtaaagtctgcacgtggataacttgaccagttagaggccttcgatggaaacgggtttttttcatgtaaggctagacagaagaattcccagtaacttccttgtgttgtgtacattcaactcacagagttgaactttcccttagacagagcagatttgaaacactctttttgtgcaattggcaagtggagatttcaagcgctttgaggtcaatggcagaaaaggaaatatcttcgtttcaaaactacacagaatgattctcagaaactcctttgtgatgtgtgcgttcaactcacagagtttaacctttcttttcatagaacagttaggaaacactctgtttgtaaagtctgcaagtggatattcagacctccttgaggctttcgttggaaacgggatttcttcatattctgctagaaagaagaattctcagtaacttccttgtgttgtgtgtattcaactcacagagttgaacgatcctttacacagagcagacttgaaaccctctttttgtggaatttgcaagtggagatttcagccgctttgaggtcaatggtagaataggaaatatcttcctatagaaactagacagaatgattctcataaactcctttgtgatgtgtgcgttcaactcacagtagtttaacctttcttttcatagagcagttaggaaacactctgtttgtaaagtctgcaagtcgatattcagacctctttgaggccttcgttggaaacgggatttcttcatattctgctagacagaagaattctcagaaacttcctggtgttgcgtgttttcaactcacagagttcaacgatccgttacacagagtagacttgaaaaactctttttgttgaattggccagtggagatttcagccgctttgaggtcaatggtagaaaaggaaatatcttcgtataaaaactagacagaatgattctcagaaactcctttgtgatgtgtgcgttcaactcacagagtttaacctttcttttcatagagcatttaagaaacactctggttgtaaagtctgcaagtggatattcagacctcgttgaggcctttgttggaaacgggatttcttcatattatgctagacagaagaattcccagtaacttccttgtgttgtgtgtgttcaactcacagagttgaactttcatttacacagagcagatttgaaacactctttttgtggaatttgcaagtggagatttcaagcgctttgaggccaaaggcagaaaaggaaatgtcttcgtttcaaaactagacagaatgattctcagaaactcctttgtgatgtgggcgttcaactcacagagtttaacctttcttttcatagagccgttaggaaacactctgtttgtaaattctgcacgtggatatttggacttctttgaggccttcgttggaaacgggtttttttcatgtaaggctagacggaagaattcccagtaacttccttgtgttgtgtacattcaactcacagagttgaacgttcccttagacagagcagatttgaaacactctttttgtgcaattggcaaatggagatttcaagcgctttaagttcaatggcagaaaaggaaatatcttcgtttcagaactagacagaatcattcccacaaactgcgttgtgatgtgttcgttcaactcacagagtttaacctttcttttcatagagcacttaggaaacagtctgtttgtcaattctgtaagtggatattctgacatcttgtggccttcgttggaaacgggatttcttcatattctgctagacagaagaattctcagtaacttccttgtgttgtgtgtattcatctcacagagttgaacgatcctttacacagagcagacttgaaacattctttttgtggaatttgcaagtggagatttcagccgctttgaggtcaatggtagaatgggaaatatcttcctatagaaactagacagaatgattctcagaaactcctttgtgatgtgtgcgttcaactcacacagttcaacctttcttttcatagagcagttgggaaacactctgtttgtaaagtctgcaagtggatattcagacttctttgaggccttcgttggaagcgggatttcttcatgttctgctagacagaagaattctcagtaactgcctgtgttgtgtgtattcaactcacagagttgaacgatcctttacacagagcagacttgaaacactctttttgtggaatttgcaagtggagatttcagccgctttgaggtcaatggtagaataggaaatatcttcctatagaaactagacagaatcattctcagaaactgctgcgtgatgtgtgcgttcaactctcagagtttaacttttcttttcattcatcggtttggaatcactctgtttgtaaagtctgcacgtggatattttgaccacttagaggccttcgttggaaacgggttttttcatgtaaggctagacagaagaattctcagtaacttccttttgttgtgtgtattcaactcacagagttgaacgatcctttacacagagcagatttgaaacactctttttgtgccattggcaagtggagatttcaagcgcttaaaggtcaatggcagaaaaggaaatatcttcgtttcaaaactagacagaatcattcccacaaactgcgttgtgatgtgttcgttcaactcacagagtttaacctttcttttcatagagcagttaggaaacagtctgtttgtcaattctgtaagtggatattctgacatcttgtggccttcgttggaaacgggatttcttcatattctcctagacagaagaattctcagtaacttcccttgtgttgtgtgtattcaactcacagagttgaacgatcctttacacagagcagacttgaaacactctttttgtggaatttgcaagtggagatttcagccgctttgaggtcaatggtagagtaggaaatatcttcgtataaagactagacagaatgattctcagaaactcctttgtgatgtgtgcgttcaactcacagagtttaacctttcttttcatagagcagttaggaaacactctgtttgtaatgtctgccagtggatattcagacatctttgaggctttcgttggaaacgggttttcttcatattctgctatacagaagaattctcagtaacttccttgtggtgtgtgtattcaactgacagagttgaactttcatttagagagagcagatttgaaacactgtttttgtggaatttgcaagtggagatttcaagcgctttggggccaaaggcagaaaaggaaatatcttcgtataaaaactagacagaatcattctcagaaactgctgggtgatgtgtgcgttcaactctcagagtttaacttttctttttattcagcggtttggaaacactctgtttgtaaagtctgcacatggatattttgaccacttagaggccttcgttggaaacgggtttttttcatgtaaggctagacagaagaattcccagtaacttccttgtgttgtgtacattcaactcacagagttgaacgttcccttagacagagcagatttgaaacactctttttgtgcaattggcaagtggtgatttcagccgctttgaggtcaatggtagaaaaggaaatatcttcgtataaaaactagacagaatcattcccacaaactgcgttgtgatgtgttcgttcaactcacagagtttaacctttcttttcatagagcagttaggaaacaatctgtttgtcaattctgtaagtggatattctgacatcttgtggccttcgttggaaacgggatttcttcatattctgctagacagaagaattctcagtaacttccttctgttgtgtgtattcaactcacagagttgaacgatcctttacacagagcagacttgaaacactctttttgtggaatttgcaagtggagatttcagccgctttgaggtcaatggtagaaaaggaaactatcctcttataaagactagacagaatgattctcagaaaatcttttgtgatgtgtgcgttcaactcacagagtttaacttttcttctcatagagcagttaggaaacactctgtttgtaaagtgtgcaagtggatattcagacctctttgaggccttcgttggaaacgggatttcttcatattctgctagacagaagaattctcagtaacttccttgtgttgtgtgtattcaactgacagagttgaactttcatttagagagagcagatttgaaacactgtttttgtggaatttgcaattggagatttcaagtgctttggggccaaaggcagaaaaggaaatatcttcgtataaaaactagacagaatcattctcagaaactgctgcatgatgtgttcgttcaactctcagagtttaacttttcttttcattcagcggtttggaaacactctgtttgtaaagtctgcacgtggaaattttgaccacttagaggccttcgttggaaacgggattttttcatgtaaggctagacagaagaattcccagtaacttccttgtgttgtgtgcattcaactcacagagttgaacgttcccttagacagagcagatttgaaacactctatttgtgcaatttgcaagtgtaggtttcaagcgctttaaggtcaatggcagaaaaggaaatatcttcgtttcaaaactagacagaatcattcccacaaactgcgttgtgatgtgttcgttcaactcacagagtttaacctttctgttcatagagcagttaggaaacactctgtttgtaaagtctgaaagtggatattctgacatcttgtggccttcgtttgaaacgggatttcttcatattctgctagacagaagaattctcagtaacttccttgtgttgtgtgtattcaactcacagagttgaacgatcctttacacagagcagacttgaaacactctttttgtggaatttgcaagtggagatttcagcctctttgaggtcaatggtagaataggatatatcttcctatagaaactaggcagaatgattctcagaaacttctttgtgatgtgtgcgttcaactcacagagtttaacctttcttttcatagagcagttaggaaacactctgtttgtaaactctgcaagtggatactcagacctgtttgaggccttcgttggaaacgggatttcttcatactatgctagacagaagaattcgcagtaacttccttgtgttgtgtgtgttcaactcacagagttgaactttcatttacacagagcagatttgaaacactctttttgtggaatttgcaagtggagatttcaagcgctttgaggccaaaggcagaaaaggaaatatcttcgtttgaaaactagacagaatcattctcagaaactgctgcgtgatgtgtgcgttcaactctcagagtttaacttttcttttcattcagcggtttggaaatactctgtttgtaaagtctgcacgtggatattttgaccacttagaggccttcgttggaaacgggtttttttcatgtaaggctagacagaagaattcccagtaacttccttgtgttgtgtgcattcaactcacagagttgaacgttcccttagacagagcagatttgaaacactctatttgtgcaatttgcaagtgtagatttcaagcgctttaaggtcaatgacagaaaaggaaatatcttcgtttcaaaactagacagaatgattctcagaaactcctttgtgatgtgtgcgttcaactcacagagttttacctttctgttcatagagcagttaggaaaccctctgtttgtaaagtctgcaagtggatattcagacctccttgaggccttcgttggaaacgggatttcttcatattctgctagacagaagaattctcagtaacttccttgtgttgtgtgtattcaactcacagagttgaacgatcctttgcacagagcagacttgaaacactctttttgtggaatttgcaagtggagatttcagccgctttgaggtcaatagtagaaaaggaaatatcttcgtagaaaaactagacagaatgattctcagaaactcccttgtgatgtgtgcgttcaactcacagagtttaacctttcttttcatagagcagttaggaaacactctgtttgtaaagtctgcaagtggatattcagacttccttgaggccttcgttggaaacgggatttcttcatattatgctagacagaagaattcccagtaacttccttgtgttgtgtgtgttcaactcacagagttgaactttcatttacacagaacagatttgaaacactctttttgtggaatttgcaaatggagatttcaagcgctttgaggccaaaggcagaaaaggaaatatcttcgtataaaaactagacagaatcattctcagaaactgctctgcgatgtgtgcgttcaactctcagagtttaacttttcttttcattcagcagtttggaaacactctgtttgtaaagtctgcacgtggatattttgaccacttagaggccttcgttggaaacgggttttttcctgtaaggctagacagaagaattctcagtaacttccttgtgttgtgtgtattcaactcacagagttgaacgttcccttagacagagcagatttgaaacactctatttgtgcaatttgcaagtgtagatttcaagcgctttaaggtcaatggcagaaaaggaaatatcttcgtttcaaaactagacagaatcattcccacaaactgcgttgtgatgtgttcgttcaactcacagagtttaacctttctgttcatagagcagttaggaaatactctgtttgtaaagtctgtaagtggatattctgacatcttgtggccttcgttggaaacgggatttcttcatattctgctagacagaagaattctcagtaacttccttgtgttgtgtgtattcaactcacagagttgaacgatcctttacacagagcagacttgaaacactctttttgtggaatttgcaagtggagatttcagccgctttgagttcaatggtagaaaaggaaatatcttcctatagaaactagacagaacgattctcagaaactcctttgtgatgtgtgcgttcaactcacagagtttaacctttcttttcatagagcagttaggaaacactctgtttgtaaagtctgcaagtggatattcagacctctttgaggctttcgttggaaacgggatttcttcctattctgctagacagaagaattcccagtaacttccttgtgttgtgtgtgttcaactcacagagttgaactttcatttacacagagcagatttgaaacactctttttgtggaatttgcaagtggagatttcaagcgctttgaggccaaaggcagaaaaggaaatatcgtcgtttcaaaactagacagaatgattctcagaaactcctttgtgatgtgtgcgttcaagtcacagagtttaacctttcttttcatagagcagttaggaaacactctgtttgtaaagtctgcaagtggatattcagacctctttgaggccttcgttggaaacgggtttttttcatataagggtagacagaagaattcccagtaacttccttgtgttgtgtacattcaactcacagagttgaacgttcccttagacagagcagatttgaaacactctttttgtgcaattggcaagtggtgatttcagccgatttgaggtcaattgtagaaaaggaaatatcttcgtagaaaaactagacagaatcattcccacaaactgcgttgtgatgtgttcgtccaactcacagagtttaacttttcttttcatagagcagttaggaaacagtctgtttgtaaagtctgtaagtggatattctgacctcttgtggccttcgttggaaacgggatttcttcatattctgctagacagaagaattctcagaaacttccttgtgttgtgtgttttcaactcacagagttgaacgatgctttacacagagtagacttgaaacactcttgttgtggaatttgcaagtggagatttcagcctctttgaggtcaatggtagaataggaaatatcttcctatagaaactagacagaacgattctcagaaactcctttgtaatgtgtgcgttcaactcacagagtttaacctttcttttcatagagcagttaggaaacactctgtttgtaaagtctgcaagtggatattcagacctctttgaggccttcgttggaaacgggatttcttcatattctgctagacagaagaatttccagtaacttccttgtgttgtgtgtgttcaactcacagagttgaactttcatttacacagagcagatttgaaacactctttttgtggaatttgcaaatggagatttcaagcgctttgaggccaaaggcagaaaaggaaatatcttcgtttcaaaactagacagaatcattctcagaaactgctgcgtgatgtgtgcgttcaactctcagagtttaacttttcttttcattcagcggtttggaaacactctgtttgtaaagtctgcacgtggatattttgaccacttagaggccttcgttggaaatgggattttttcatgtaaggctagacagaagaattcccagtaacttccttgtgttgtgtgcattcaactcacagagttgaacgttcccttagacagagcagatttgaaacactccatttgtgcaatttgcaagggtagatttcaagcgctttaaggtcaatggcagaaaaggaaatatcttcgtttcaaaactagacagaatcattcccacaaactgcgttgtgatgtgttcgttcaactcacagagtttaacctttctgttcatagagcagttaggaaacactctgtttgtaaagtctgtaagtggatattctgacatcttgtggccttcgttggaaatgggatttcttcatattctcctagacagaacaattctcagtaacttccttgtgttgtgtgtattcaactcacagagttgaacgatcctttacacagagcagtcttgaaacactctttttgtggaatttgcaagtggagatttctgccgctttgaggtcaatggtagaataggaaatatcttcctatagaaactagacagaatgattctcagaaactcctttgagatgtgtgtgttcaactcacagagtttaacatttcttttcatagagcagttaggaatcactctgtttgtaaagtctgcaagtggatattcagacctctttgaggccttcgttggaaacgggtttttttcatataaggctagacagaagaattcccagtaacttccttgtgttgtgtgtgttcaactcacagagttgaactttcatttacacagagcagatttgaaacactctttttgtggaatttgcaaatggagatttcaagcgctttgaggccaaagcagaaaaggaaatatcttcgtataaaaactagacagaatcattttcagaaactgctctgcgatgtgtgcgttcaactctcagagtttaacttttcttttcattcaggagtttggaaacactctgtttgtaaagtctgcacgtggataacttgaccacttagaggccttcgttggaaacgggtttttttcatgtaaggctagacagaagaattcccggtaacttccttgtgttgtgtacattcaactcacagagttgaacgttcccttagacagagcagatttgaaacactctttttgtgcaattggcaagtggagatttcaagcgctttaaggtcaatggcagaaaaggaaatatcttcgtttcaaaactcttcagaaagattctcataaactcctttgtgatgtgtgcgttcaactcacagagtttaacctttcttttcatagagcagttaggaaacactctgtttgtaaagtctgcaagtggatattcagacctctttgaggccttcgttggaaacgggatttcttcatattatgctagacagaataattctcagtaacttccttgtgttgtgtgtattcaactcacatagttgaaggatcctttacagagagcaggcttgaaacactctttttgtcgaatttgcaagtggagatttcagccgctttgaggtcaatggtagaataggaaatatcgtcttatagaaactagacagaatgattctcagaaactcctttgtgatgtgtgcgttcaactcacagagtttaacctttcttttcatagagcagttaggaaacactctgcttgtaaagtctgcaagtggatattcagacctctttgaggccttcgttggaaacgggtttttttcatataaggctagacagaagaattcccagtaacttccttgtgttgtgtgtgttcaactcacagagttgaactttcatttacacagagcagatttgaaacactctttttgtggaacttgcaaatggaggtttcaagcgctttgaggccaaaggcagaaaaggaaatatcttcgtataaaaaatagacagaatcattctcagaaactgctctgcgatgtgtgcgttcaactctcacagtttaacttttcttttcattcagcagtttggaaacactctgtttgtaaagtctgcaagtggatattttgaccacttagaggccttcgttggaaacgggtttttttcctgtaaggctagacagaagaattcccagtaacctccttgtgttgtgtacattcaactcacagagttgaacgttcccttagacagagcagatttgaaacactctttttgtgcaattggcaaatggagatttcaagcgctttaaggtcaatggcaggaaaggaaatatcttcgtttcaaaactagacagaatcattcccacaaactgcgttgtgatgtgttcgttcaactcacagagtttaacctttcttttcatagagcagttaggaaacagtctgtttgtcaattctgtaagtggatattctgacatcttgtggccttcgttggaaacgggacttcttcatattctcctagacagaataattctcagtaacttccttgtgttgtgtgtattcaactcacagagttgaaggatcctttacagagagcagacttgaaacactctttttgtggaatttgcaagtggagatttcagccgtttgaggtcaatggtagaataggaaatatcttccaatagaaactagacagaatgattctcagaaactcctttgtgatgtgtgtgttcaactcacagagtttaacctttcttttcatagagcagttaggaaacactctgtttgtaaagtctgcaagtggatattcagacctctttgaggccttcggttggaaacgggtttttttcatataaggctagacagaagaattcccagtaacttccttgtgttgtgtgtgttcaactcacagagttgaactttcatttacacagagcagatttgaaacactctttttgtggaatttgcaagtggagatttcaagcccttagaggccaaaggcagaaaaggaaatatcttcgtttgaaaactagacagaatcattctcagaaactgctctgtgatgtgtgcgttcaactctcagagtttaacttttcttttcattcagcagtttggaaacactctgtttgtaaagtctgcacgtggataatttgaccacttagaggccttcgttggaaacgggtttttttcatgtaaggctagacagaagaattcccagtaacttccttgtgttgtgtacattcaactcagagagttgaacgttcccttagacagagcagatttgaaacactctttttgtgcaattggcaagtggagatttcaagcgctttgaggtcaacggcagaaaaggaaatatcttcgtttcaaaactagacagcatcattcccacaaactgcgttgtgatgtgttcgttcaactcacagagtttaacctttgttttcatagaggagttaggaaacagtctgtttgtaaattctgtaagtggatattctgacatcttgtggccttcgttggaaacgggatttcttcatattctgctagacagaagaattctcagtaacttccttgtgttgtgtgtattcaactcacagagttgaacgatcctttacacagagcagactggtaacactctttttgtggaatttgcaagtggagatttcagccgctttgaagtcgaaggtagaaaaggaaataacttcctataaaaactagacagaatgattctcaaaaaatcctttgtgatgtgtgcgttcaactcacagagtttaacttttcttttcatagagcagttaggaaacactctgtttgtaaagtctgcaagtggatattcagacctctttgaggccttcgttggaaacgggaatttttcatattctgctagacagaagaattctcagtaacttccttctgttgtgtgtattcaactcacagagttgaacgatcctttacagagagcagacttgaaacactctttttgtggaatttgcaagtggagatttcagccgctttgaggtcaatggtagaataggaaatatcttcctatagaaactagacagaatgattctgagaaactcctttgtgatgtgtgcgttcaactcacagagtttaacctttcttttcatagagcagttagtagacactctgtttgtaaagtctgcaagtggatattcagatctctttgaggccttcgttggaaacgggatttcttcatattatgctagacagaagaattcccagtaacttccttgtgttgtgtgtgttcgactcacagagttgaactttcatttacacagagcagatttgaaacactctttttgtggaatttgcaagtggagatttcaagcgctttgaggccaaaggcagaaaaggaaatatcttcgtttcaaaactagacagaatcattctcagaaactgctctgcaatgtgtgcgttcaactctcagagtttaacttttcttttcattcagcagtttggaaacactctgtttgtaaagtctgcacgtggatattttgaccacttagaggccttcgttggaaacgggtttttttcctgtaaggctaaacagaagaattcccagtaacttccttgtgttgtgtacattcaactcacagtgttgaacgttcccttagacagagcagatttgaaacactctttttgtgcaattggcaagtggagatttcaagcgctttaaggtcaatggcagaaaaggaaatatcttcgtttcaaaactagacagaatcattcccacaaactgcgttgtgaagtgctcgttcaactcacagattttaacctttctgttcatagagcagttaggaaacactctgtttgtaaagtctgtaagtggatattctgacatcttgcggccttcgttggaaacggaatttcttcatattctgctagacagaagaattctcagtaacttccttgtgttgtgtgtattcaactcacagagatgaacgatcctttacacagagcagacttgaaacactctttttgtggaatttgcaagtggagatttcagccgctttgagttcaatggtagaataggaaatatcttcctatagaaactagacagaatgattctcagaaactcctttgtgatgtgtgcgttcaactcacagagtttaacctttcttttcatagagcagttaggaaacactctgtttataaagtctgcaggtggatattcagacctctttcaggccttcgttggaaacgggtttttttcatgtaaggctagacagaagaattcccagtaacttccttgtgttgtgtgtgtccaactcacagagttgaactttcatttacacagagcagacttgaaacactctttttgtggaatttgcaagtggagatttcaagcgctttgaggccaaaggcagaaaaggaaatatcttcgtttcaaaactagacagaatcattctcagaaactgctctgtgatgtgtgcgttcacctctcagagtttaagttttcttttcattcagcagtttggaaacactctgtttgtaaagtctgcacgtggatattttgaccacttagaggccttcgttggaaacgggtttttttcatgtaagaccagacagaagaattcccagtaacttccttttgttgtgtgcattcaactcacagagatgaacattcccttagacagagcagatttgaaacactctatttgtgtaatttgcaagtgtagatttcaagcgctttaaggtcaatggcagaaaaggaaatatcttcgtttcaaaactagacagaatcattcccacaaactgcgttgtgatgtgttcgttcaactcacagagtttaacctttctgttcatagagcagttaggaaacactctgtttgtaaagtctgtaagtggatattctgacatcttgtggccttcgttggaaacggtatttcttcatattctgctagacagaagaattctcagaatcttccttgtgttgtgtgtattcaactcacagagttgaacgatcctttacacagagcagacttgaaacactctttttgtggaatttgcaagtggagatttcagcagctttgaggtccatggtagaaaaggaaatatcttcgtataaaaactagacagaatgattctcagaaactcctttgtgatgtgtgtgttcaactcacagagtttaacctttcttttcatagagcagttagtaaacactctgtttataaagtctgcaagtggatattcagacccctttgaggccttcgttggaaacggaatttcttcatattatgctagacagaagaattctcagtaacttccttgtgttgtgtgtattcaactcacagagttgaacgatcctttacacagagcagacttgaaacactctttttgtggaatttgcaattggagatttcagccgctttgagttcaatggtagaataggaaatatcttcctatagaaactagacagaatgattctcagaaactcctttgtgatgtgtgcgttcaactcacagagttcaacctttcttttcatagagccgttgggaaacactctgtttgtaaagtctgcaagtggatattcagacctctttgaggccttcgttggaagcgggatttcttcatattcttctagacagaagaattcccagtaacttccttgtgttgtgtgtgttcaactgacagagttgaactttcatttacacagagcagatttgaaacactctttttgtggaatttgcaagtggagatttcaagcgctttgaggccaaaggcagaaaaggaaatatcttcgtataaaaactagacagaatcattctcagaagctgctctgcgatgtgtgtgttcaactctcagagtttaacttttcttttcattcagcagtttggaaacactctgtttgtaaagtctgcacgtggataatttgaccacttagaggccttcgttggaaacgggtttttttcatgtaaggttagacagaagaattcccagtaacttccttgtgttgtgtgcattcaactcacagagttgaacgatcctttacacagagcagacttgaaacactctttttgtggaatttgcaagtggagatttcagccgctttgaggtcaatggtagaataggaaatatcttcctatagaaactagacagaatcattcccacaaactgcgttgtgatgtgttcgttcatctcacagagtttaacctttcttttcatagagcagttaggaaacactctgtttgtaaattctgtaagtggatattctgacatcttgtggccttcgttggaaacgggatttcttcatactgtgctagacagaagaattctcagtaacttccttgtgttgtgtttattcaactcacagagttgaatgatcctttacacagagcagacttgaaacactctttttgtggaatctgcaagtggagatttcagccgctttgaggtcaatggtagaaaaggaaatatcttcgtataaagactagacagaacgattctcagaaactcctttgtgatgtgtgcgtacaactcacagagtttaacctttcttttcatagagcagttaggaaacactctgtttgtaaagtctgcaagtggatattcagacctctttgaggccttcgttggaaacgggatttcttcatattctgctagacagaagaattctcagtaacttccttgtgttgtgtgtattcaactcacagagttgtacgatcctttacacagagcagacttgaaacactctttttgtggaatttgcaagtggagatttcagccgctttgaggtcaatagtagaaaaggaaatatcttcgtagaaaaactatacagaatcattcccacaaactgcgttgtgatgtgttcgttcaactcacagagtttaacctttgtgttcatagagcagttaggaaacactctgtttgtaaagtctgtaagtggatattctgacatcttgtggccttcgttggaaaccggatttcttcatattctgctagacagaagaattctcagtaacttccttgtgttgtgtgtattaaactcacagggttgaacgatcctttaaacagagcagacttgaaacactctttttgtggaatttgcaagtggagatttcagccgctttgaggtcaatggtagaataggaaatatcttcctatagaaactagacagaatgattctcagaaactcctttgtgatgtgtgcgttcaacacacagagtttaacctttcttttcatagaggagttagtaaacactctgtttataaagtctgcaagtggatattcagacccctttgaggccttcgttggaaacgggatttcttcatattctgctagacagaagaattctcagtaactttccttgtgttgtgtgtattcaactgacaaagttgaactttcatttagagggagcagatttgaaacactgtttttgtggaatttgcaagtggagatttcaagcgctttggggccaaaggcagaaaaggatatatcttcgtataaaaactagacagaatcattttcagaaactgctgcgtgatgtgtgcgttcaactctcagagtttaacttttcttttcattcagcggtttggaaacactctgtttgtaaagtctgcacgtggatattttgaccacttagaggccttcgttggaaacgggtttttttcatgtaaggctagacagaagaattcccagtaacttccttgtgttgagtgcattcaactcacagagttgaacgttcccttagacagagcagatttgaaacactctatttgtgtaatttgcaagtgtagatttcaagcgctttaaggtcaatggcagaaaaggaaatatcttcgtttcaaaactagacagaatgattctcagaaactcctttgtgatgtgtgcgttcaactcacagagtttaacctttctgttcatagagcagttaggaaacactctgtttgtaaagtctgtaagtggatattctgacatcttgtggccttcgttggaaacgggatttctgcatattctgctagacagaaaaattctcagtaacttccttgtgttgtgtgtattcaactcacagagttgaacgatcctttacacagagcagacttgtaacactctttttgtggaatttgcaagtggagatttcagccgctttgaagtcaaaggtagaaaaggaaatatcttcctataaaaactagacagaatgattctcagaaactcctttgtgatgagtgtgttcaactcacagagtttaacctttcttttcatagagcagttaggaaacactctgtttgtaaagtctgcaagtggatattcagacctctttgaggccttcgttggaaacgggtttttttcatataaggctagacagaaggattcccagtaacttccttgtgttgtgtgtgttcaactcacacagttgaactttcatttacaaagagcagatttgaaacactctttttgtggaatttgcaagtggagatttcaagcgctttgaggccaaaggcagaaaaggaaatatcttcgtataaaaactagacagaatcattctcagaaactgctctgcgatgtgtgcgttcaactctcagagtttaacttttcttttcattcagtagtttggaaacactctgtttctaaagtctgcacgtggataatttgaccacttagaggccttcgttggaaacgggtttttttcatgtaaggctagacagaagaattcccagtaacttccttgtgttgtgtgcattcaactcacagagttgaacgttcccttagagcagatttgaaacactctatttgtgcaatttgcaagtgtagatttcaagcgctttaaggtcaatggcagaaaaggaaatatcttcgtttcaaaactagacagaatcattccgacaaactgcgttgtgatgtgttcgttgaactcacagagtttaacctttctgttcatagagcagttaggaaacactctgtttgtaaagtctgtaagtggatattctgacatcttgtggccttcgttggaaacgggatttcttcatattctgctggacagaataattctcagtaagtcccttgtgttgtgtgtattcaactcacagagttgaacgatcctttacacagagcagacttgaaacattctttttgtggaatttgcaactggagatttcagccgctttgaggtcaatggtagaataggaaatatcttcctatagaaactagacagaatgattctcagaaacttctttgggatgtgtgccttcaactcacagagtttaacctttcttttcatagagcagttaggaaacactctgtttgtaaagtctgcaagtggatattcagacctctttgaggccttcgttggaaacgggtttttttcatataaggctagacagaagaattcccagtaacttccttgtgatgtgtgtgttcaactcacagagttgaactttcatttacacagagcacatttgaaacactctttttgtggaatttgcaagtggagatttcaagcgctttgaggccaaaggcagaaaaggaaatatcttcgtataaaaactagacagaatcattctcagaaactgctctgcgatgtgtgcgttcaactctcagagtttaacttttcttttcattcagaagtttggaaacactctgtttgtaaagtctgcacgtggataacttgaccacttagaggccttcgttggaaacgggtttttttcatgtaaggctagacagaagaattcccagtaacttccttgtgttgtgtgcattcaactcacagagttgaacgttcccttagacagagcagatttgaaacactctatttgtgcaatttgcaagtgtagatttcaagcgctttaaggtcaatgacagaaaaggaaatatcttcgtttcaaaactagacagaatgattctcagaaactcctttgtgatgtgtgcgttcaactcacagagttctacctttcttttcatagagcagttgggaaacactctgtttgtaaagtctgcaagtggatattcagacttctttgaggccttcgttggaagcgggatttcttcatattctgctagacagaagaattctcagtaacttccttgtgttgtgtgtattcaactcacagagttgaacgatcctttacacagaacagtcttgaaacactctttttgtggaatttgcaagtggagatttcagccgctttgaggtcaatggtagaataggaaatatcttcctatagaaactagacagaataattctcagaaactgctttgtgatgtgtgcgttcaactcacagagtttaaactttcttttcatagagcagttaggaaacactctgtttataaagtcggcaagtggatattcagacctctttgaggccttcgttggaaacgggatttcttcatattctgctagacagaaaaattctcagtaacttccttgtgttgtgtgtattcaactcacagagttgaacgatcgtttacacagagcagacttgaaacactctttttgtggaatttgcaaggggagatttcagccgctttgaggtcaatagtagaaaaggaagtatcttcatatagaaattatacagaatgattctcagaaactcctttgagctgtgtgcgttcaactcacagagtttaacctttcttttcatagagcagttaggaaacactctgtttgtaaagtctgcaagtggatattcagacatctttgaggctttcgttggaaacgggatttcttcatattctgctagacagaagaattctcagtaacttccttgtgttgtgtgtattcaactcacagagttgaacgatcctttacacagagcggacttgaaacactctttttgtggaatttgcaagtggagatttcagccgcgttgaggtcaatggtataaaaggaaatatcttcgtataaaaactagacagaataattctcagaaactcctttgtgatgtgtgtgttcaactcacagagtttaacctttcttttcatagagcagttagtaaacactctgtttataaagtctgcaagtggatattcagacccctttgaggccttcgttggaaacgggatttcttcatattatgctagacagaagaattcccagtaacttccttgtgttgtgtgtgttcaactcacagagttgaacgttcatttacacagagcagatttgaaacactctttttgtggaatttgcaagtggagatttcaagcgctttgaggccaaaggcagaaaaggaaatatctccgtttcaaaactagacagaatcattctcagaaactgctctgtgatgtgtgcgttcaactctcagagtttaacttttcttttcattcagcagtttggaaacactctgtttgtaaagtctacacgtggatattttgaccacttagagaccttcgttggaaacgggtttttttcatgtaaggctagacagaagaattcccagtaacttccttgtgttgtgtgcattcaactcacagagatgaacgttcccttagacagagcagatttgaaacactctatttgtgcaatttgcaagtgtagatttcaagcactttaaggtcaatggcagaaaaggaaatatcttcgtttcaaaactagacagaatcattcccacaaactgcgttgggatgtgctcgttcaactcacagagtttaaactttctgttcatagagcagttaggaaacactctgtttgtaaagtctgtaagtggatattctgacatcttgtggccttcgttggaaacgggatttcttcatattctgctagacagaagaattctcagtaacttccttgtgttgtgtgtattcaactcacagagttgaacgatcctttacacagagcagacatgtaacactctttttgtggaatttgtaagtggagatttcagccgcgttgaggtcaatggtagaaaaggaaatatcttcgtataaaaactagacagaatgattctcagaaacttcattgtgatgtgtgcgttcaactcacagagtttaacctttcttttcatagagaagttaggaaacactctgtttgtaaactctgcaagtggatattcagacctctttgaggccttcgttggaaacgggatttcttcatactgtgctagacagaataattctcagtaacttccttgtgttgtgtgtattcaactcacagagttgaaagatcctttacagagagcaggcttgaaacactctttttgtcgaatttgcaagtggagatttctgccgctttgaggtcaatggtagaataggaaatatcttcttatagaaactagacagaatgattctcagaaactcctttgtgatgtgtgtgttcaactcacagagtttaacctttcttttcatagagcagttaggaaacactctgtttgtaatgtctgcaagtggatattgagacctctttgaggccttcgttggaaacgggtttttttcatataaggctagacagaagaattcccagtaacttccttgtgttgtgtacattcaactcacagagttgaacgttcccttagacagagcagatttgaaacactctttttgtgcaattggcaagtggagatttcaagcgctttaaggtcaacggcagaaaaggaaatatcttcgtttcaaaactagacagaatcattcccacaaactgcgttgtgatgtgttcgttcaactcacagagtttaacctttctgttcatagagcagttaggaaacactctctttgtaaagtctgtaagtggatattctgacatcttgtggccttcgttggaaacgggatttcttcatattctgctagacagaagaattctcagtaacttccttgtgttgtgtgtattcaactcacagagttgaacgatcctttacacagagcagacttgaaacattctttttgtggaatttgcaagtggagatttcagccgctttgaggtcaatggtagaataggaaatatcttcctatagaaactagacaggaacgattctcagaaactcctttgtgatgtgtgcgttcaactcacagagtttaacctttcttttcatagagcagttaggaaacactctgtttgtaatgtctgcaagtggattttcagacctccttgaggccttcgttggaaacgggatttcttcctattctgctagacagaagaattctcagaaacttccttgtgtagtgtatattcaactcacagagttgaacgatcctttacacagagcagacttgaaacactctttttgtggattttgcaagtggagatttcaagcgcttttggggccaaaggcagaaaaggaaatatcttcatataaaaactagacagaatcattctcagaaactgctctgtgatgtgtgcgttcaactctcagagtttaacttttcttttcattcagcagtttggaaacactctgtttgtaaagtctgcacgtggatattttgaccacttagaggccttcgttggaaacgggttttcttcatgtaaggctagacagaagaattcccagtaacttccttgtgttgtgtgcattcaactcacagagttgaacgttcccttagacggagcagatttgaaacactctatttgtgcaatttgcaagtgtagatttcaagcgctttaaggtcaatggcagaaaaggaaatatcttcgtttcaaaactagagagaatcattcccacaaactgcgttgtgatgtgttcgtacaactcacagagtttaacctttctgttcatagagcagttaggaaacactctgtttgtaaagtctgtaagtggatattcagacatcttgtggccttcgttggaaacgggatttcttcatattctgctagacagaagaattctcagtaacttccttgtgttgtgtttattcaactcacagagttgaatgatcctttacgcagagcagacttgaaacactctttttgtggaatttgcaagtggagatttcagccgctttgaggtcaatggtagaaaagtaaatatcttcgtataaagactagacagaatgattctcagaaactcctttgtgatgtgtgcattcaactcacagagtttaacctttctgttcatagagcagttaggaaacactctgtttgtaaagtctgcaagtggatattcagacctccttgaggccttcgttggaaacgggatttcttcatattctgctagacagaagaattcccagtaacttccttgtgttgtgtgtgttcaactcacagagttgaactttcatttacacagagcagatttgaaacactctttttgtggaatatgcaagtggagatttcaagcgcttttaggccaaaggcagaaaaggaaatatcttcgtttcaaaactagacagaatgattctcagaaactgctctgcgatgtgtgcgttcaactctcagagtgtaacttttcttttcattcagcagtttggaaacactctgtttgtaaagtctgcacgtggatattttgaccacttagaggccttcgttggaaacgggtttttttcctgtaaggctagacagaagaattcccagtaacttccttgtgttgtgtacattcaactcacagagttgaacgttcccttagacagagcagatttgaaacactctttttgtgcaattggcaaatggagatttcaagcgctttaagttcaatggcagaaaaggaaatatcttcgtttcaaaactggacagaatcattcccacaaactgcgttgtgatgtgttcgttcaactcacagagtttaacctttcttttcatagagcagttaggaaacagtctgtttgtcaattctgtaagtggatgttctgacatcttgtggccttcgttggaaacgggatttcttcatattctgctagacagaagaattctcagtaacttccttgtgttgtgtgtatttaactcacagagttgaacgatcctttacacagagcagacttgaaacactctttttgtggaatttgcaagtggagatttcagccgctttgaggtcaatggtagaataggaaatatcttcgtataaaaactagacagaatgattctcagaaactcctttgtgatgtgtgcgttcaactcacagagtttaacctttcttttcatagagcagttaggaaacactctgtttgtaaagtctgcaagtggatattcagacctccttgaggccttcgttggaaacgggatttctacatattatgctagacagaagaattctcagtaacttccttgtgttgtgtgtattcaactcacagagttgaacgatcctttacacagagcagacttgaaacactctttttgtggaatttgcaagtggagatttctgcctctttgaggtcaatggtagaatacgaaatatcttcctatagaaactagacagaatcattctcagaaactgctgcatgatgcgtgcgttcaactctcaaagtttaacttttcttttcattcagcggtttggaaacactctgtttgtaaagtctgcacgtggatattttgaccacttagaggccttcgttggaaacgggtttttttcatgtaaggctagacagaagaattcccagtaatttccttgtgttgtgtgcattcaactcacagagttgaacgttcccttagacagagcagatttgaaacactctatttgtgcaatttgcaagtgtagatttcaagcgctttaaggtcaatggcagaaaaggaaatatcttcgtttcaaaactagacagaatcattcccacaaactgcgttgtgatgtgttcgttcaactcacagagtttaacctttctgttcatagagcagttaggaaacactctgtttgtaaagcctgtaagtggatattctgacatcttgtggccttcgttggaaacgggatttcttcatattctgctagacagaagaattctcagtaacttccttgtgttgtgtgtattcaactcacagagttgaacgatcctttacacagagcagacttgaaacactctttttgtgtaatttgcaagtggagatttcagacgatttgaggtcaatggtagaaaaggaaatatcttcgtataaagactagacagaatgattctcagaaactcctttgtgatgtgtgtgttcaactcacaaagtttaacctttcttttcatagagcagttaggaaacactctgtttgtaaagtctgcaagtggatattcagacctctttgaggccttcgttggaaacgggtttttttcatataaggctagacagaagaattcccagtaacttccttgtgttgtgtgtgttcaactcacagagttgaactttcatttacacagagcagatttgaaacactctttttgtggaatttgcaaatggagatttcaagcgctttgaggtcaaaggcagaaaaggaaatatcttcgtataaaaactagacagaatgattctcagaaactgctctgcgatgtgtgcgttcaactctcagagtgtatcttttcttttcattcagcagtttggaaacactctgtttataaagtctgcacgtggatattttgaccacttagaggccttcgttggaaacgggattttttcatgtaaggctagaccgaagaattcccagtaacttccttgtgttgtgtgcattcaactcacagagttgaacgttcccttagacagagcagatttgaaacactctatttgtgcaatttgcaagtgtagatttcaagcgctttaaggtcaatggcagaaaagggaatatcttcgtttcaaaactagacagaatcattcccacaaactgcgttgtgatgtgttcgttcaactcacagagtttaacctttctgttcatagagcagttaggaaacactctgtttgtaaagtctgtaagtggatattctgacctcttgtggccttcgttggaaacgggatttcttcatattctgctagacagaagaattctaagtaacttccttgtgttgtgtgtattcaactcacagagttgaacgatcctttacagagagcagacttgaaacactctttttgtggaatttgcaagtggagatttcagccgctttgaggtcaatggtagaataggaaatatcttcctatagaaactagacagaatgattctcagaaacttcattgtgatgtgtgcgttcaactcacagagtttaacctttcttttcatagagcagttaggaaacactctgtttgtaaactctgcaagtggatattcagacctctttgaggccttcgttggaaacgggatttcttcatactgtgctagacagaagaattctcagtaacttccttgtgttgtgtgtattcaactcacagagttgaacgatcctttacacagagcagacttgtaacactctttttgtggaatttgcaagtggagatttcagccgctttgaatcaaaggtagaaaaggaaatatcttcctataaaaactagacagaatgattctcagaaactccttcgtgatgtgtgcgttcaactcacagagtttaacctttcttttcatagagcagttaggaaacactctgtttgtaaagtctgcaagtggatattgagacatctttgaggccttcgttggaaacgggatttcttcatgttctgctagacagaagaattcccagtaacttccttgtgttgtgtgcattcaactcacagagttgaacgttcccttagacagagcagatttgaaacactctatttgtgcaatttgcaagtgtagatgtcaagcgctttaaggtcaatggcagaaaaggaaatatcttcgtttcaaaactagacagaatcattcccacaaactgcgttgtgatgtgttcgttcaactcacagagtttaacctttctgttcatagagcagttaggaaacactctatttctaaagtctgtaagtggatattctgacatcttgtggccttcgttggaaacgggatttcttcatattctgctagacagaagaattctcagtaacttccttgtgttgtgtgtattcaactcacagagttgaacgatcctttacacagagcagacttgaaacattctttttgtggaatttgcaagtggagatttcagccgctttcaggtcaatggtagaataggaaatatcttcatatagaaactagacagaatgattctcagaaactcctttgtgatgtgtgcgttcaactcacagagtttaacctttcttttcatagagcagttgggaaacactctgtttgtaaagtctgcaagtggatattcagacctccttgaggccttcgttggaaacgggatttcttcatataatgctagacagaagaattctcagtaacttccttgtgttgtgtgtattcaactcacagagttgaacgatcctttacacagagcacacttgaaacactctttttgtggaatttgcaagtggagatttcagccgctttgaggtcaatagtagaaaaggaaatatcttcgtagaaaaactagacagaatcattctcagaaactgctgcgtgatgtgtgcgttcaactctcagagtttaacttttcttttcattcagcggtttggaaacactctgtttgtaaagtctgcacgtggatattttgaccacttagaggccttctttggaaacgggttttcttcatgtaaggctagacagaagaattcccagtaacttccttgtgttgtgtgcattcaactcacagagttgaacgttcctttagacagagcagatttgaaacactctatttgtgcaatttgcaagtgtagatttcaagcgctttaaggtcaacggcagaaaaggaaatatcttcgtttcaaaactagacagaatcattcccacaaactgcgttgtgatatgttcgttcaactcacagagtttaacctttctgttcatagagcagttaggaaacactgtgtttgtaaagtctgtaagtggatattctgacatcttgtggccttcgttggaaacgggatttcttcatattgtgctagacagaagaattctcagtaacttccttgtgttgtgtgtattcaacacacagagttgaacgatcctttacacagagcagacttgaaacactctttttgtggaatttgcaagtggagatttcagccgctttgatgtcaatggtagaaaaggaaatatcttcgtataaagactagacagaatgattctcagaaactcctttgtgatgtgtgcgttcaactcacagagtttaacctttcttttcatagagcagttaggaaacactctgtttgtaaagtctgcaagtggatattcagacctctttgaggccttcgttggaaacaggtttttttcctataaggctagacagaagaattcccagtaacatccttgtgttgtgtgtgttcaactcacagagttgaactttcatttacacagatcagatttgaaagactctttttgtggaatttgcaaatggagatttcaagcgctttgaggccaaaggcagaaaaggaaatatcttcgtttcaaaactagacagaatcattccaagaaactgctctgcgatgtgtgcgttcaactctcagagtttaaatttgcttttcattcagcagtttggaaacactctgtttgtaaagtctgcacgtggataatttgaccacttagaggccttcgttggaaacgggtttttttcatgtaaggctagacagaagaattctcagtaacttccttgtgttgtgtgtattcaactcacacagttgaacgatcctttacacagagcagacttggaacactctttttgtggaatttgcaagtggagatttcagccgctttgaagtcaaaggtagaaaaggaaatatcttcctataaaaactagacagaatcattcccacaaactgcgttgtgatggtgttcgttcaactcacagagtttaacctttcttttcatagagcagttaggaaacagtctgtttggtaaattctgtaaggggatattctgacatcttgtggccttcgttggaaacgggatttcttcatattctgctagacagaacaattctcagtaacttccttgtgttgtgtgtattcaactcacagagttgaacgatcctttacacagagcagacttgaaacactctttttgtggaatttgcaagtggagatttcagccgctttgaggtcaatagtagaaaaggaaatgtcttcgtagaaaaactagacagaatgattctcagaaactcctttgtggtgtgtgcgttcaactcacagagtttaacctttcttttcatagagcagttaggaaacactctgtttgtaaagtctgcaagtggatattcagacctctttgaggccttcgttggaaacgggattttttcatataaggctagacagaataattctcagtaacttccttgtgttgtgtgtattcaactgagagagttgaacgttcatttagagagagcagatttgaaacactgtttttgtggaatttgcaattggagatttcaagcgctttagggccaaaggcagaaaaggaaatatcttcgtataaaaactagacagaatcattctcagaaactgctgcgtgatgtctgcgttcaactctcagagtttaacttttcttttcattcagcggtttggaaacactctctttgtaaagtctgcacgtggatattttgacctcttagaggccttcgttggaaacgggttttcttcatgtaaggctagacagaagaattcccagtaacttccttgtgttgtgtacattcaactcacagagttgaacgttcccttagacagagcagatttgaaagactctttttctgcaattggcaaatggagatttcaagcgctttaaggtcaatggcagaaaaggaaatatcttcgtttcaaaactagacagaatcattcccacaaactgcgttgtgatgtgttcgttcatctcacagagtttaacctttcttttcatagagcagttaggaaacagtctgtttgtaaattctgtaagtggatattctgacatcttgtggccttcgttggaaacgggatttcttcatattctgctagacagaagaattctcagaaacttcgttgtgttgtgtgttttcaactcacagagttgaacgatcctttacacagagtagacttgaaaaactctttttgtagaatttgcaagtggagatttcagccgctttgaggtcaatggtagaaaaggaaatatcttcgtataaaaactagacagaatgattctcagaaactcctttgtgatgtgtgcgttcaactcacagagttcaacctttcttttcatagagcagttgggaaacactctgtttgtaaattctgcaaatgcatattcagacttctttgaggccttcgttggaagcgggatttcttcatattctgctagacagaagaattctcagaaacttcgatgtgttgtgtgttttcaaatcacagagttcaacgatcctttacacagagtagacttgaaacactctttttgtggaattggcagggtggagatttcagccgctttgaggtcaatggtagaaaaagaaatatcttcgtataaaaactagacagaatgattctcagaaactcctttgtgatgtgtgcgttcaacgcacagagttcaacctttcttttcatagagcagttgggaaacactctgtttgtaaagtctgcaagtggatattcagacttctttgaggccttcgttggaagcgggatttcttcatattcaactagacagaagaattcccagtaacttccttgtgttgtgtacattcaactcacagagttgaacgttcccttagacagagcagatttgaaacactctttttgtgcaattggcaaatggagatttcaagcgatttaaggtcaatggcagaaaaggaaatatcttcgtttcaaaactagacagaatgattctcagaaacttcattgtgatgtgtgcgttcaactcacagagtttaacctttcttttcatagagcagttaggaaacagtctgtttgtaaattctgtaagtggatattctgacatcttgtggccttcgttggaaacgggatttcttcatattctgctagacagaagaattatcagtaacttccttgtgttgtgtgtattcaactcacagagttgaacgatcctttacacagagcagacttgaaacactctttttgtggaatttgcaagtggagatttcagccgctttgaggtcaatggtagaataggaaatatcttcctatagaaaatagacagaatgattctcagaaactcctttgtgatgtgtgcgttcaactcacagagtttaacctttctgttcatagagcagttaggaaacactctgtttgtaaagtctgcaagtggatattcagacctctttgaggccttcgttggaaacgggatttcttcatattctgctagacagaataattctcagtaacttccttgtgttgtgtgtattcaactcacagagttgaactttcatttagagagagcagatttgaaacactgtttttgtggaatttgcaagtggagatttcagccgctttgaggtcaatggtagaataggaaatatcttcctatagaaactagacagaatcattctcagaaactactctgcgatgtgtgcgttcaactctcagagtttaacttttcttttcattcagcagtttggaaacactctgtttgtaaagtctgcacgtggatattttgaccacttagaggccttcgttggaaacgggtttctttcctgtaaggctagacagaagaattcccagtaacttccttgtgttgtgtgcattcaactcacagagttgaacgttcccttagacagagcagatttgaaacactctatttgtgcaatttgcaagtgtagattccaagcgctttaaggtcaatggcagaaaaggaaatatcttcgtttcaaaactagacagaatcattcccacaaactgcgttgtgatgtgttcgttcaactcacagagtttaacctttctgttcatagagcatttaggaaacactctgtttgtaaagtctgcaagtggatattcagacctccttgaggccttcgttggaaacgggatttcttcatattctgctagacagaagaattctcagtaacttccttgtgttgtgtgtattcaactcacagagttgaacgatcctttacacagagcagacttgaaacactctttttgtgaaatttgcaagtggagatttcagccgttttgaggtcaatggtagaaaaggaaatatcttcgtataaagactagacagaatgattctcagaaactcctttgtgatgtgtgcgttcaactcacagagttcaacctttcttttcatagagcagttgggaaacactctgtttgtaaagtctgcaagtggatattcagacctctttgaggccttctttggaagcgggatttcttcatattcttctagacagaagaattctcagtaacttccttgtgttgtgtgtattcaactcacagagttgaacgatcctttacacagagtagacttgaaacactctttttgtggaatttgcaagtggagatttcagccgctttgaggtcaatggtagaataggaaatatcttcctatagaaaccagacagaatgattctcagaaacttctttgcgatgtgtgcgttcaactcacagagtttaacctttcttttcatagagcagttaggaaacactctgtttgtaaactctgcaagtggatattcagacctctttgaggccttcgttggaaacgggatttcttcatactatgctagacagaagaattcccagtaacttccttctgttgtgtgtgttcaactcacagagttgaactttcatttacacagagtagatttgaaacactctttttgtggaatttgcaagtggagatttcaagcgctttgaggccaaaggcagaaaaggaaatatcttcgtttcaaaactagacagaatcattctcagaaactgctctgcgatgtgtgccttcaactctcagagtttaacttttcttttcattcagcagtttggaaacactctgtttgtaaagtctgcacgtggatattttgaccacttagaggccttcgttggaaacgggtttttttcctgtaaggctagacagaagaattcccagtaacttccttgtgttgtgtacattcaactcacagagttgaacgttcccttagacagagcagatttgaaacactctttttgtgcaattggcaaatggagatttcaagcgctttaagatcaatggcagaaaaggaaatatcttcgtttcaaaactagacagaatcattccaacaaactgcgttgtgatgtgttcgttcaactcacagagtttaacctttctgttcatagagcagttaggaaacactctgtttgtaaagtctgtaagtggatattctgacatcttgtggccttcgttggaaacgggatttcttcatattctgctagacagaagaattctcagaaacttcgttctgttgtgtgttttcaactcacagagttcaacgatcctttacagagagtagacttgaaacactctttttgtggaattggcagggtggagatttcagccgctttgaggtcaatggtagaaaaggaaatatcttcgtataaaaactagacagaatgattctcagaaactcctttgtgatgtgtgcgttcaactcacagtgtttaacctttcttttcctagagtagttaggaaacactctgtttttaaagtctgcaagtggatattcagacctctttgaggccttcgttggaaacgggatttcttcatattatgctagacagaagaattctcagtaacttccttgtgttgtgtgtattcaactgacagagttgaactttcatttagagatagcagatttgaaacactgtttttgtggaatttgcaagtggagatttcaagcgctttggggccaaaggaagaaaaggaaatatcttcgtataaaaactagacagaatcattctcagaaactgctgcgtgatgtgtgcgttcaactctcagagtttaacttttcttttcattcagcggtttggaaacactctgtttgtaaagtctgcacttggatattttgaccacttagaggccttcgttggaaacgggttttttttcatgtaaggctagacagaagaattcccagtaacttccttgtgttgtgtgcattcaactcacagagttgaacgttcccttagacagagcagatttgaaacactctatttgtgcaatttgcaagtgtagatttcaagcgctttaaggtcaatggcagaaaaggaaatttcttcgtttcaaaactagacagaaatcattcccacaaactgcgttgtgatgtgttcgttcaactcacagaagtttaacctttcttttcatagagcagttaggaaacagtctgtttgtaaattctgtaagtggatattctgacatcttgtggccttcgttggaaacgggatttcttcatattctgctagacagaagaattctcagaatcttcccttgtgttgtgtgtattcaactcacagagttgaacgatcctttacacagagcagacttgaaacactctttttgtggaatttgcaagtggagatttcagccgctttgaagtcaaaggtagaaaaggaaatatcttcctataaaaactagacagagtgattctcagaaactcctttgtgatgtctgcgttcaactcacagagtttaacctttcttttcatagagcagttaggaaacactctgtttgtaaagtctgcaagtggatattcagacctccttgaggccttcgttggaaacgggatttcttcatattatgctagacagaagaattctcagtaacttccttgtgttgtgtttattcaactgacagagttgaactttcatttagagagagcagatttgaaacactgtttttgtggaatttgcaagtggagatttcaagcgctttggggccaaaggcagaaaaggaaatatcttcgtataaaaactagacagaaatcattctcagaaactgctctgtgatgtgtgcgttcaactctcagagtttaacttttcttttcattcagcagtttggaaacactctgtttgtaaagtctgcacgtgcataatttgaccacttagaggtcttcgatggaaacgggtttttttcatgtaaggctagacagaagaattctcagtaacttccttgtgttgtgtgtattcaactcacagagttgaacgatcctttacacagagcagtcttgtaacactctttttgtggaatttgcaagtggagatttcagccgctttgaagtcaaaggtagaaaaggaaatatcttcctataaaaactagacagaatcattcccacaaactgcgttgtgatgtgtttgttcaactcacagagtttaacctttcttttcatagagcagttaggaaacagtctgtttgtaaattctgtaagtggatattctgacatcttgtggccttcgttggaaacgggatttcttcatattctgctagacagaagaattctcagaaacttccttgggttgtgtgtattcaactcacagagttgaacgatcgtttacacagagcagacttgaaacactctttttgtggaatttgcaagtggagatttcagccgctttgaggtcaatggtaggaaaggaaatatcttcgtataaaaattagacagaatgattctcagaaactcctttgtgatgtgtgcgttcaactcacagagtttaacctttcgtttcatagagcagttaggaaacactctgtttgtaaagtctgcaagtggatattaagacctctttgaggccttcgttggaaacgggatttcttcatattctgctagacagaagaattctcagtaacttccttgtgttgtgtgtattcaactgacagagttgaactttcatttagagagagcagatttgaaacactgtttttgtggaatttgcaagtggagatttccagcgctttggggccaaaggcagaaaaggaaatatcttcgtataaaaactagacagaatcattctcagaaactgctctgcgatgtgtgcgttcaactctcagagtttaacttttcttttcattcagcagtttggaaacactctgtttgtaaagtctgcacgtggataacttgaccacttagaggccttcgttggaaacgggtttttttaatgtaaggctagacagaagaattcccagtaacttccttgtgttgtgtacattcaactcacagagttgaacgttcccttagacagagcagatttgaaactctctttttgtgcaattggcaagtggagatttcaagcgctttaaggtcaatggcagaaaaggaaatatcttcgtttcaaaactagacagaatcattcccacaaactgcgttgtgatgtgttcgttcgactcacagagtttaacctttctgttcatagagcagttaggaaacactctgtttgtaaagtctgcaagtggatattcagacctccttgaggccttcgttggaaacgggatttcttcattttctggtagacagaagagttctcagtaacttccttgtgttgtgtgtattcaactcacagagttgaacgatcctttacacagagcagacttgaaacactctttttgtggaatttgcaagtggagatttcagccgcttttaggtcaatagtagaaaaggaaatatcttcgtagaaaaactagacagaatgattctcagaaactcctttgtgatgtgtgcgttcaactcacagagtttaacttttcttttcatagagcagttaggaaacactctatttgtaaagtctgcaagtggatattcagacctctttgaggccttcgttggaaacgggatttcttcatattatgctagacagaagaattttcagtaacttccttgtgttgtgtgtagtcaactgacagagttgaactctcatttagacagagcagatttgaaacactctttttgtggaatttgcaagcggagattacaagcgctttgaggccaaaggcagaaaaggaaatatcttcgtataaaaactagacagaatcattctcagaaactgctctgcgatgtgtgcgttcaactctcagagtttaacttttcttttcattcagcagtttggaaacactctgtttgtaatgtctgcacgtggatattttgaccacttagaggccttcgttgcaaacgggtttttttcctgtaaggctagacagaagaattcccagtaactatccttgtgttgtgtacattcaactcacaagcagttgaacgttcccttagacagagcagatttgaaacactctttttgtgcaattggcaagtggagatttcaagcgctttaaggtcaatggcagaaaaggaaacatcttcgtttcaaaactagacagaatgattctcagaaactcctttgtgatgtgtgcgttcaactcacagagtttaacctttcttttcatagagcagttaggaaacactctgcttgtaaagtctgcaagtggatattcagacctctttgaggccttcgttggaaacgggatttcttcatactgtgctagacagaagaattctcagtaacttccttgtgttgtgtgtattcaactcacagagttgaacgatcctttacacagagcggacttgaaacacactttttgtggaatttgcaagtggagatttcagccgcgttgaggtcaatggtagaaaaggaaatatcttcgtataaaaaccagacagaatgattctcagaaaatcttttgtgatgtgtgcgttcaactcacagagtttaacttttcttctcatagagcagttaggaaacactctgtttgtaaagtctgcatgtggatattcagacctctatgaggccttcgttggaaacgggatttctacatattatgctagacagaagaattctcagaaacttccttgtgttgtgtgttttcaactcacagagttgaacgatcctttacacagagcagacttgaaacactctttttgtggaatttgcaagtggagatttcagccgctttgaggtcaatggtagaataggaaatatcttcatatagaaactagacagaatgattctcagaaacttctttgtgatgtgtgcgttcaactcacagagtttaacctttcttttcatagagcagttaggaaacactctgtttgtaaactctgcaagtggatattcagacctctttgaggccttcgttggtaacgggatttcttcatactatgctagacagaagaattcccagtaacttccttgtgttgtgtgtgttcaactcacagagttgaactttcatttacacagagcagatttgaaacactctttttgtggaatttgcaagtggagatttcaagcgctttgaggccaaaggcagaaaaggaaatatctttgtttcaaaactagacagaatcattctcagaaactgctctgcgatgtgtgcgttcaagtctcagagtttaacttttcttttcattcagcagtttggaaacactctgtttgtaaagtctgcacgtggataatttgaccacttagaggccttcgttggaaacgggttttgttcatgtaaggctagacagaagaattcccagtaacttccttgtgttgtgtacattcaactcacagagttgaacgttccctttgacagagcagatttgaaacactctttttgtgcaattggcaagtggagatttcaagcgctttaaggtcaatggcagaaaaggaaatatcttcgtttcaaaactagacagaatgattctcagaaactcctttgtgatgtgtgcgttcaactcacagagttcaacctttcttttcatagagcagttgggaaacactctgtttgtaaagtctgcaagtggatattcagacttctttgaggccttcgttggaagcgggatttcttcatattctgcttgacagaagaattctcagtaacttccttgtgttgtgtgtattcaactcacagagttgaacgatcctttacacagagcatacttgaaacactcttgttgtggaatttgcaaggggagatttcagccgctttgaggtcaatggtagaataggaaacatcttcctatagaaactagacagaataattctcagaaactcctttgtgatgtgtgcgttcaactgacagagtttaacctttcttttcatagagcagttaggaaacactctgtttgtaaagtctgcaagtggatattcagacctctttgaggccttcgttggaaacgggtttttttcatataaggctagacagaagaattctcagtaacttccttgtgttgtgtgtatttaactcacagagttgaatgatcctttacacagaacagtcttgaaacactctttttgtggaatttgcaagtggagatttcagccgctttgaggtcaatggtagaataggaaatatcttcctatagaaactagacagaatgattctcagaaactcgtttgtgatgtgtgtgttcaactcacagagtttaacctttcttttcatagagcagttagtaaacactctgtttataaagtctgcaagtggatattcagacccctttgaggccttcgttggaaacgggatttcttcatattatgctagacagaagaattctcagtaacttccttgtgttgtgtgtattcaactgacagagttgaactttcatttggagagagcagatttgaaacactgtttttgtggaatttgcaagtggagatttcaagcgctttggggccaaaggcagaaaaggaaatatcttcgtataaaaactagacagaatcattctcagaaactgctgcgtgatgtgtgcgttcaactctcagagtttaacttttcttttcattcagccgtttggaaacactccgtttgtaaagtctgcacgtggaaattttgaccacttagaggccttcgttggaaacgggtttttttcatgtaaggctagacagaagaattcccagtaacttccttgtgttgtgtacattcaactcacagaattgaacgttcccttagacagagcagatttgaaacactctttttgtgcaattggcaagtggagatttcaagcgctttaaggtcaatggcagaaaaggaaatatcttcgtttcaaaactagacagaacgattctcagaaactcctttgtgatgtgtgcgttcaactcacagagtttaacctttcttctcatagagcagttaggaaacactctgtttgtaaagtctgcaagtggatattcagacatcttcgaggctttcgttggaaacgggatttcttcatattctgctatacagaagaattctcagtaacttccttgtgttgtgtgtattcaaatcacagagttgaatgatcctttacacagaacagacttgaaacactctttttgtggaatttgcaagtggagatttcagccgctttgaggtcaatggtagaataggaaatatcttcctatagaaactagacagaatgattctcagaaactcctttgtgatgtgtgcgttcaactcacagagtttaacctttcttttcatagagcagttaggaaacactctgtttgtaaagtctgcaagtggatattcagacctccttgaggccttcgttggaaacgggatttcttcctattctgctagacagaagaattcccagtaacttccttgtgttgtgtgtgttcaactcacagagttgaactttcatttacacagagcagatttgaaacactctttttgtggaatttgcaaatggagattttaagcgctttgaggccaaaggcagaaaaggaaatatcttcgtataaaaactagacagaatcattctcagaaactgctctgcgatgtgtgcgttcaactctcagagtttaacttttcttttcattcagaagtttggaaacactctgtttgtaaagtctgcacgtggatattttgaccatttagaggccttcgttggaaacgggtttttttcttgtaaggctagacagaagaattcccagtaacttccttgtgttgtgtagattcaactcacagagttgaacgttcccttagacagagcagatttgaaacactctttttgtgcaatcggcaagtggagatttcaagcgctttaaggtcaatggcagaaaaggaaatatcttcgtttcaaaactagacagaatcattcccacaaacggcgttgtgatgtgttcgttcaactcacagagtttaacctttctgttcatagagcagttaggaaacactctgtttgtaaagtctgcaagtggatattcagacctccttgaggccttcgttggaaacgggatttcttcatattctgctagacagaagaattctcagtaacttccttgtgttgtgtgtattcaactcacacagttgaacgatcctttacacagagcagacttgaaacactctttttgtggaatttgcaagtggagatttcagccgctttgaggtcaatggttgaaaaggaaactatcttcatataaagactagacagaatgattctcagaaactcctttgtgatgtgtgtgttcaactcacagagtttaacctttcttttcatagagcagttaggaaacactctgtttataaagtctgcaagtggatattcagacccctttgaggtcttcgttggaaacgggatttcttcatattatgctagacagaagaattctcagtaacttccttgtgttgtgtgtattcaactcacagagttgaaggatcctttacagagagcaggcttgaaacactctttttgtcgaatttgcaagtggagatttcagccgctttgaggtcaatggtagaataggaaatatcttcttatacaaactagacagaatgattctcagaaactcctttgtgatgtgtgcgttcaactcacagagtttaacctttcttttcatagagcagttaggaaacactctgtttgtaaagtctgcaagtggatattgagacctcctttaggacttcgttggaaacgggatttcttcatattatgctagacagaagaattcccagtaacttctttgtgttgtgtacattctactcacagagttgaacgttcccttagacagagcagatttgaaacactctttttgtgcaattggcaagtgttgatttcaaccgctttgaggtcaatggtagaaaaggaaatatcttcgtataaaaactagacagaatcattcccgcaaactgcgttgtgatgtgttcgttcaactcacagagtttaacctttcttttcatagagcagttaggaaacagtctgtttgaaaattctgtaagtggatattctgacatcttgtggccttcgttggaaacgggatttcttcatattctgctagacagaagaattctcagtaacttccttgtgttgtgtgtattcaactcacagagttgaacgatcctttacacagagcagacttgaaacaccctttttgtggaatttgcaagtggagatttcagccgcgttgaggtcaatggtagaaaaggaaatatcttcgtataaaaactggacagaaggattctcagaaactcctttgtgatgtgtgcattcaactcacagagtttaacctttcttttcatagagcagttaggaaacactctgtttgtaaagtctgcaagtggatattcagacctctttgaggccttcgttggaaacgggatttcttcatattctgctagacagaagaattctcagtaacttccttgtgttgtgtgtattcaactcacagagttgaacgatccttttcacagagcagacttgaaacactctttttgtggaatttgcaagtggagatttcagccgctttgaggtcaatggtagaataggaaatatcttcgtagaaaaactagacagaatgattctgagaaactcctttgtgatgtgtgcgttcaactcacacagtttaacctttcttttcatatagcagttaggaaacactctgtttgtaaagtctgcaagtggatattcagacctccttgaggccttcgttggaaacgggatttcttcaaattctgctagacagaagaattcccagtaacttccttgtgttgtgtacattcaactcacagagttgaacgtttccttagacagagcagatttgaaacactctttttgtgcaattggcaagtggtgatttcagccgctttgtggtcaatggtagaaaaggaaatatcttcatataaaaactagacagaatcattcccacaaactgcgttgtgatgttttcgttcaactcacagggtttaacctttcttttcatagagcagttaggaaacactctgtttgtaaagtctctaagtggatatactgacatcttgttgccttctttggaaacgggatttcttcatattctgctatacagaagaattctcagtaacttccttgtgttgtgtgtattcaactcacagagttaaatgatcctttacacagagcagacttgaaaaactctttttgtggaatttgcaagtggagatttcagccgctttgtggtcaatggtagaataggaaatatcttcctatagaaactagacagaatgattctcaggaactcctatgtgatgtgtgcgttcaactcacagagtttaacttttcttttcatagagcagttaggaaacactctgtttgtaaagtctgcaagtggatattcagacctcttgaggccttcgttggaaacgggatttcttcatattatgctagacagaagaattctcagtaacttaccttgtgttgtgtgtattcaactgacagagttgaactttcatttagagagagcagatttgaaacactgtttttgtggaatttgcaagtggagatttcaagcgctttgcggccaaaggcagaaaaggaaatatcttcgtataaaaactagacagaatcattctcagaaactgctgcgtgatgtatgcgttcaactctcagagtttaacttttcttttcattcagcggtttggaaacactctgttgtaaagtctgcacgtggatattttgaccacttagaggccttcgttggaaaggggtttttttcatgtaaggctagacagaagaattcccagtaacttccttgtgttgtgtgcattcaactcacagagttgaacgttcccttagacagagcagatttgaaacactctatttgtgcaatttgcaagtgtagatttcaagcgctttaaggtcaatggcacaaaaggaaatatcttcgtttcaaaactagacagaatcattcccacaaactgcgttgtgatgtgttcgttcaactcacagagtttaacctttctgttcatagagcagttaggaaacactctgtttgtaaagtctgcaagtggatattcagacctccttgaggctttctttggaaacgggatttcttcatattctggtagacagaagaattctcagaaacttccttgtgttctgtgtattcaactcacagagatgaacgatcctttacacagagcagatttgacacactctttttgtggaatttgcaagtggagatttcagccgctttgaggtccatggtagaaaaggaaatatcttcgtataaaaactagacagaatgattctcagaaactcctttgtgatgtgtgcgttcaactcacagagtttaacttttctgttcatagagcagttaggaaacactctgtttgtaaagtctgcaagtggatattcagacctctttgaggccttcgttggaaacgggatttcttcatattattctagacagaagaattcccagtaacttccttgtgttgtgtgtgttcaactcacagagttaaacttccatttacacagagcagatttgaaacactctttttgtggaatttgcaagtggagatttcaagcgctttgaggccaaaggcagaaaaggaaatatcttcgtttcaaaactagacagaaatcattctcagaaactgctctgcgatgtgtgcgttcaactctcagcagtttaacttttcttttcattcagcagtttggaaacactctgtttttaaagtctgcacgtggataatttgaccacttagaggccttcgttggaaacgggtttttttcatgtaaggctagacagaagaattctcagtaacttccttgtgttgtgtgtattcacctcacagagttgaacgatcctttacacagagcagacttgtaacactctttttgtggaatttgcaagtggagatttcagccgctttgaagtcaaaggcagaaaaggaaatatcttcctataaaaactagacagaatcattcccacaaactgcgttgtgatgtgttcgttcaactcacagagtttaacctttctattcatagagcagttaggaaacactctgtttgtaaagtctgcaagtggatattcagaccaccttgaggccttcgttggaaacgggatttcttgatattctgctagacagaagatttctcagtaacttccttgtgttgtgtgtattcaactcacagagttgaacgatcctttacacagagcagacttgaaacactctttttgtggaatttgcaagtggagatttcagccgctttgaggtcaatggtagaataggaaatatcttcgtatagaaactagacagaatgattctcagaaactcctttgtgatgtgtgcgttcaactcacagagttcaacctttcttttcatagagcagttgggaaacactctgtttgtaaagtctgcaagtggatattcagacttctttgaggccttcgttggaagcgggatttcttcatattctgctagaaagaagaattcccagtaacttcccttgtgttgtgtgtgttcaactcacagagttgaactttcatttacacagagcagatttgaaacactctttttgtggaatttgcaggtggagatttcaagcgctttgaggccaaaggcagaaaaggaaatatcttcgtataaaaactagacagaatcattctcagaaactgctctgcgatgtgtgcgttcaactctcagagtttaacttttcttttcattcagcagtttggaaacactctgtttgtaaagtctgcacgtggataacttgaccacttagaggccttcgttggaaacgggtttttttcctgtaaggctagacagaagaattcccagtaacttccttgtgttgtgtgcattcaactcacagagttgaacgttcccttagacagagcagatttgaaacactctatttgtgcaatttgcaagtgtagatttcaagcgctttaaggtcaatggcagaaaaggaaatatctccgtttcaaaactagacagaatcattcccacaaactgcgttgtgatgtgctcgttcaactcacagagtttaacctttctgttcatagagcagttaggaaacactctgtttgtaaagtctgtaagtggatattctgacatcttgtggccttcgttggaaacgggatttcttcatattctgctagacagaagaattctcaataacttccttgtgttgtgtgtattcaactcacagagttgaacgatcctttacacagagcagacttgaaacactctttttgtggaatttgcaagtggagatttcagccgctttgaggtcaatggtagaaaagggaatatcttcgtatcgaaactagacagaatgattctcagaaactcctttgtgatgtgtgcgttcaactcacagagtttaacctttctgttcatagagcagttaggaaacactctgtttgtaaagtctgcaagtggatattcagacctccttggggccttcgttggaaacgggatttcttcatattctgctagacagaagaattcccagtaacttccttgtgttgtgtgtgttcaaatcacagagttgaactttcatttacacagagcagatttgaaacactctttttgtggaatttgcaagtggagatttcaagcgctttgaggccaaaggcagaaaaggaaatatcttcgtttcaaaactagacagaatcattctcagaaactgctctgcgatgtgtgcgttcaactctcagagtttaacttttcttttcattcagcagtttggaaacactctgtttgtaaagtctgcacgtggataacttgaccacttagaggccttcgttggaaccgggtttttttcatgtaaggctagacagaagaattcccagtaacttccttgtgttgtgtgcattcaactcacagagttgaacgttcccttagacagagcagatttgaaacactctatttgtgcaatttgcaagtgtagatttcaagcgctttaaggtcagtggcagaaaaggaaatatcttcgtttcaaaactagacagaatcattcccacaaactgcgttgtgatgtgttcgttcaactcacagagtttaacctttcttttcatagagcagttaggaaacagtctgtttgtcaattctgtaagtggatattctgacatcttgtggccttcgttggaaacgggatttcttcatattctcctagacagaagaattctcagtaacttccttgtgttgtgtgtattcaactcacagagttgaacgatcctttacacagagcagacttgaaacactctttttgtggaatttgcaagtggagatttcagccactttgaggtcaatggtagaaaaggaaatatcttcgtagaaaaactagacagaacgattctcagaaactcctttgtgatgtgagcgttcaactcacacagtttaacctttcttttcttagagcagttaggaaacactctgtttgtaaagtctgcaagtggatattcagacctctttgaggccttcgttggaaacgggatttcttcgtattctgctagacagaagaattctcagtaacttcttggtgttgtgtgtattcaactcacagagttgaacgatgctttacacagagcagacttgaaacactctttttgtggaatttgcaagtggagatttcagccgctttgaggtccatggtagaaaaggaaatatcttcgtataaaaactagacagaatgattctcagaaactcctttgtgatgtgtgcgttcaactcacagagtttaaactttcttttcatagagcagttaggaaacactctgtttgtaaagtctgcaggtggatattcagacatcattgaggctttcgttggaaaagggatttcttcatattctgctagacagagaattcccagtaacttccttgtgttgtgtgtgttcaactcacagagttgaactttcatttacacagagcagatttgaaacactctttttgtggaatttgcaagtggagatttcaagcgctttgaggccaaaggcagaaaaggaaatatcttcgtttcaaaactagacagaatcattctcagaaactgctctgcgatgtgtgcgttcaactctcagagtttaacttttcttttcattcagcagtttggaaacactctgtttgtaaagtctgcacgtggatattttgaccacttagaggctttcgttggaaacggatttttttcctgtaaggctagacagaagaattcccagtaacttccttgtgttgtgtacattcaactcacagagttgaacgttcccttagacagagcagatttgaaacactctttttgtgcaattggcaagtggagatttcaagcgctttaaggtcaatggaagaaaaggaaatatcttcgtttcaaaactagacagaatcattcccacaaactgcgttgtgatgtgttctttcaactcactgagtttaacctttcttttcatagagcagttaggaaacaatctgtttgtaaattctgtaagtggatattctgacatcttgtggccttcgttggtaacgggatttcttcatattctgttagacagaagaattctcagtaacttccttgtgttgtgtgtattcaactcacagagttgaacgattctttacacacagcagacttgaaacactctttttgtggaatttgcaagtggagatttcagccgctttcaggtcaatggtagaataggaaatatcttcctatagaaactagacagaatgattctcagaaactcctttgtgatgtgtgcgttcaactcacagagttttaccattcttttcatagagcagttaggaaacactctgtttgtaaagtctgcaagtggatattcagacctctttgaggccttcgttggaaacgggatttcttcatattctgctagagagaagaattctcagtaacttccttgtgttgtgtgtattcaactcacagagttcaacgatcctttacacagagcagacttgaaacactctttttgtggaatttgcaagtggagatttcagccgctttgaagtcaatggtagaaaaggaaatatcttcgtataaaaagtagacagaatgattctcagaaactcctttgtgatgtgtgcattcaactcacagagtttaacctttcttttcatagagcagttaggaaacactctgtttgtaaagtctgcaactggatattcagacctccttaaggccttcgttggaaacgggatttcttcatattatgctagacagaagaattcccagtaacttcccttgtgttgtgtgtgttcaactcacagagttgaactttcatttacacagagcagatttgaaacactctttttgtggaatttgcaagtggagatttcaagcgctttgaggtcaaaggcagaaaaggaaatatcttcgtataaaaactagacagagtctttctcagaaactgctctgtgatgtgtgcgttcaactctcagagtttaacttttcttttcattcagcagtttggaaacactctgtttgtaaagtttgcacgtggacattgtgaccacttagaggccttcgttggaaacgggtttttttcatgtaaggctagacagaagaattcccaataacttccttgtgttgtgtgcactcaagtcacagagatgaatgttcccttagacagagcagatttgaaacactctatttgtgcaatttgcaagtgtagatttcaagcgctttaaggtcaatggcagaaaaggaaatattttcgtttcaaaactagacagaatgattctcagaaactcctttgtgatatgtgcgttcaactcacagagtttaacctttcttttcatagagcagttaggaaacactctgtttgtaatgtctgcaagtggatattcagacatctttgaggctttcgttggaaacgggatttcttcatattctgctagacagaagaattctcagaaacttccttgtgttgtgtgttttcaactcacagagttgaacgatcctttaccacagagcagacttgaaacactctttttgtggaatttgcaagtggagatttcagccgctttgaggtcaatggtagaaaaggaaatatcttcgtataaaaactagacagaatgattctcagaaactcctttgtgatgtgtgcgttcaacacacagagttaaacttttcttttcatagagcagttaggaaacactctgtttgtaaagtctgcaagtggatattcagacctctttgaggccttcggtggaaacgagatttcttcatattatgctagacagaacaattctcagtaacttccttgtgttgtgtgtattcaactcacagagttgaacgatcctttacagagagcacacttgaaacactctttttgtggaatttgcaagtggagatttcagccgctttgaggtcaatggtagaataggaaatatcttccaatagaaactagacagaatcattctcagaaactgctctgcgatgtgtgcgttcaactctcagagtttaacttttcttttcattcagcagtttggaaacactctgtttgtaaagtctgcacgtggataatttgaccacttagaggccttcgttggaaacgggtttttttcatggaaggctagacagaagaattcccagtaacttccttgtgttgtgtacattcaactcacagagttgaacgttcccttagacagagcagatttgaaacactctttttgtgcaattggcaaatggagatttcaagcgctttaaggtcaatggtagaataggaaatatcttcgtttgaaaactagacagaatcattcccacaaactgcgttgtgattgtgttcgttcaactcacagagtttaacctttctgttcatagagcagttaggaaacactctgtttgtaaagtctataagtggatattctgacatcttgtggccttcgttggaaacgggatttcttcatattctgctagacagaagaattctcagtaacttccttgtgttgtgtgtattcaactcacagagttgaacgatactttacacagagcagacttgtaacactctttttgtggaatttgcaagtggagatttcagccgctttgaagtcaaaggtagaaaaggaaatatcttcctataaaaactagacagaatgattctcagaaactcctttgtgatgcgtgcgttcaactcacagagtttaacctttcttttcatagtgcagttaggaaacactctgtttgtaaagtctgcaagtggatattcagacctccttgaggccttcgttggaaacgggatttctacatattatgctagacagaagaattctcagtaacttccttgtgttgtgagtattcaactcacagatttgaacgatcctttacacagagcagacttgaaacagtctttttgtggaatttgcaagtggagatttcagcctctttgaggtcaatggtagaataggaaatatcttcctatagaaactagacagaatcattctcagaaactgctctgcgatgtgtgcgttcaactctcagagtttaacttttcttttcattcagcagtttggaaacactctgtttgtaacgtctgcacgtgaataatttgaccacttagaggccttcgttggaagcgggtttttttcatgtaaggctagacagaagaattcccagtaacttccttgtgttgtgtgcattcaactcacacagttgaacgttcccttagacagagcagatttgaaacactctatttgtgcaatttgcaagtgtagatttcaagcgctttaaggtcaatggcagaaaaggaaatttcttcgtttcaaaactagacagaatcattcccacaaactgcgttgtgatgtgttcgttcaactcacagagtttaacctttctgttcatagagcagttaggaaacactctgtttgtacagtctgcaagtggatattcagacctccttgaggccttcgttggaaacgggatttcttcatattctgctagacagaagaattctcagaatcttccttgtgttgggtgtattcaactcacagagttgaacgatcctttacacagagcagacttgaaacactctttttgtggaatttgcaagtggagatttcagccgctttgaggtccatggtagaaaaggtaatatcttcgtataaaaactagacagaatgattctcagaaactcctttgtgatgtgtgcgctcaactcacagagtttaacctttcttttcatagagtagttaggaaacactctgtttgtaaagtctgcaagtggatattcagacctctttgaggccttcgtaggaaacgggatttcttcatattatgctagacagaagaattcccagtaacttccttgtgttgtgtgtgttcaactcacagagttgaactttcatttacacagagcagatttgaaactctctttttgtggaatttgcaaatggagatttcaagcgctttgaggtcaaaggcagaaaaggaaatatcttcgtataaaaactagacagaatcattctcagaaactgctctgcgatgtgtgcgttcaactctcagagtttaacttttcttttcattcagcagtttggaaacactctgtttgtaaagtctgcacgtggataatttgaccacttagaggccttcgttggaaacgggtttttttcatgtaaggctagacggaagaattcccagtaacttccttgtgttgtgtacattcaactcacagagttgaacgttcccttagacagagcagatttgaaatactctttttgtgcaattggcaagtggagatttcaagcgctataaggtcaatggcagaaaaggaaatatcttcgtttcaaaactagacagaatcattcccacaaactacgttgtgatgtgttcgttcaactcacagagtttaacctttcttttcatagagcagttaggaaacagtctgtttgtaaattctgtaagtggatattctgacatcttgtggccttcgttggaaacgggatttcttcatattctgctagacagaagaattctcagaatcttccttgtgttgtgtgtattcaactcacagagttgaacgacggtttacacagagcagatttgaaacactcatttggtggaatttgcaagtggagatttcagccgctttgaggtcaatggtagaaaaggaaatatcttcgtataacaactagacagaatgattctcagaaactcctttgtgatgtgtgtgttcaactcacagagtttaacttttcttttcatagagcagttagtaaacactctgtttataaagtctgcaagtggatattcagacccctttgtggccttcgttggaaacgggatttcttcatattatgctagacagaagaattctcagtaacttcccttgtgttgtgtgtattcaactgacagagttgaactttcatttagagagagcagttttgaaacactgtttttgtggaatttgcaagtggagatttcaagcgctttggggccaaaggcagaaaaggaaatatcttcgtataaaaactagacagaatcattctcagaaactgctctgcgatgtgtgcgttcaactctcagagtttaacttttcttttcattcagcagtttggaaacactctctttgtaaagtctgcacgtggatattttgaccacttagaggcattcgttggaaacgggtttttttcctgtaaggctagacagaagaattcccagtaacttccttgtgttgtgtgcattcaactcacagagttgaacgttcccttagacagagcagatttgaaacactctatttgtgcaatttgcaagtgtagatttcaagcgctttaaggtcaatggcagaaaaggaaatatcttcgttcaaaactagacagaatcattcccacaaactgcgttgtgatgtgttcgttcaactcacagagattaacctttctgttcatagagcagtgaggaaacactctgtttgtaaagtctgtaagtggatattctgacatcttgtggccttcgttggaaacgggatttcttcatattctgctagacagaagaattctcagtaacttccttgtgttgtgtgtattcaactcacagagttgaacgatcctttacacagagcatagttgaaacactcttgttgtggaatttgcaagtggagatttcagccgctttgaggtcaatggtagaataggaaatatcttcctatagaaactagacagaatgattctcagaaactcctttgtgatgtctgcgttcaactcacagagttaaactttcttttcatagagcagttaggaaacactctgtttgtaaagtctgcaagtggatattcagacctccttgaggccttcgttggaaaagggatttcttcatattatgctagacagaagtattcccagtaacttccttgtgttgtgtgtgttcaactcacagagttgaactttcatttacaatgagcagatttgaaacactctttttgtggaatttgcaagtggagatttcaagcgctttgaggccaaaggcagaaaaggaaatatcttcgtataaaaactagacagaatcattctcagaaactgctctgcgatgtgtgcgttcaactctcagagtttaacttttcttttcattcagcagtttggaaacactctgtttgtaaagtctgcacgtggatattttgaccacttagaggccttcgttggaaacgggtttttttcctgtaaggctagacagagaattcccagtaacttccttgtgttgtgtgcattcaactcacagagttgaacgttcccttagacagagcagatttgaaacactctgtgcaatttgcaagtgtagatttcaagcgctttaaggtcaatggcagaaaaggaaatatcttcgtttcaaaactagacagaatcattcccacaaactgcgttgtgatgtgttcgttcaactcacagagtttaacctttcttttcatagagcagttaggaaacactctgttggtaaattctgtaagtggatattctgacatcttgtggccttcgttggaaacgggatttctacatattctgctagacagaagaattctcagtaacttccttgtgttgtgtgtattcaactcacagagttgaaagatcctttacacagagcagacttgaaacactctttttgtggaatttgcaagtggagatttcagccgctttgaggtcaatggtagaaaaggaaatatcttcgtataaagactagacagaatgattctcagaaactcctttgtgatgtgtgcgttcaactcacagagtttaacctttcttttcatagagcagttaggaaacactctgtttgtaaagtctgcaagtggacattcagacctctttgaggccttcgttggaaacgggtttttttcatataaggctagacagaagaattcttagtaacttccttgtgttgtgtgtattcaactcacagagttgaatgatcctttacacagaacagtcttgaaacactctttttgtggaatttgcaattggagatttcagccgctttgaggtcaatggtagaataggaaatatcttcctatagaaactagacagaatgattctcagaaactcctttgtgatgtgtgtgttcaactctcagaatttaacctttcttttcatagagcagttagtaaacactctgtttataaagtctgcaagtggatattcagatccctttgtggccttctttggaaacgggatttcttcatattatgctagacagaagaattctcagtaacttccttctgttgtgtgtattcaactgacagagttgaactttcatttagagagagcagatttgaaacactgtttttgtggaatttgcaagtggagatttcaagcgctttggggccaaaggaagaaaaggaaatatcttcgtataaaaactagacagaatcattctcagaaactgctctgcgatgtgtgcgttcaactctcagagtttaacttcgcttttcattcagcagtttggaaacactctgtttgtaaagtctgcacgtggataatttgaccacttagaggccttcgttggaaacgggtttttttcatgtaaggctagacagaagaattctcagtaacttccttgtgttgtgtgtattcaactcacacagttgaaggatcctttacacagagcagacttgtaacactctttttgtggaatttgcaagtggagatttcagccgctttgaagtcaaaggtagaaaaggaaatatcttcctataaaaactagacagaatcattcccacaaactgcgttgtgatgtgttcgttcatctcacagagtttaacctttcttttcatagagcagttaggaaacagtctgtttgaaaattctgtaagtggatattctgacatcttgtggccttcgttggaaacgggatttcttcatattctgctagacagaagaattctcagtaacttcccttgtgttgtgtgtattcaactcacagagttgaacgatcctttacacagagcagacttgtaacactctttttgtggaatttgcaagtggagatttcagccgctttgaagtcaaaggcagaaaaggaaatgtcttcgtttcaaaactagacagaatgattctcagaaactcctttgtgatgtgtgcgttcaactcaaagagtttaacctttcttttcacagagcagttaggaaacactctgtttgtaaagtctgcaagtggatattcagacctccttgaagccttcgttggaaaagggatttcttcatattatgctagacagaagaattcccagtaacttccttgtgttgtgtgtgttcaactcacagagttgaactttcatttacacagagcagatttgaaacactctttttgtggaatttgcaagtggagatttcaagcgctttgaggccaagaggcgagaaaaggaaatatcttcgtttcaaaactagacagaatcattctcagaaactgctctgcgatgtgtgcgttcaactctcagagtttaactttgcttttcatttagcagtttggaaacactctgtttgtaaagtctgcacgtggatattttgaccacttagaggccttcgttgtaaacgggtttctttcctgtaaggctagacagaagaattcccagtaacttccttgtgttgtgtgcattcaactcacagagttgaacgttccctagacggagcagatttgaaacactctatttgtgcaatttgcaagtgtagatttcaagggctttaaggtcaatggcagaaaagggaatatcttcgtttcaaaactagacagaatgattctcagaaactactttgtgatgtgtgcgttcaactcacagagtttaacctttcttttcatagagcagttaggaaacactctgtttgtaaagtctgcaagtggatattcagacctctttgaggccttcgttggaaacggaatttcttcatactgtgctagacagaagaattctcagtaacttccttgtgttgtgtgtattcaactcacagagttgaacgatcctttacacagagcggacttgaaacacactttttgtggaatttgcaagtggagatttcaagcgctttgaggccaaaggcagaaaaggaaatatcttcgtataaaaactagacagaatgattctcagaaactcctttgtgatgtgtgcgtttaactcacagagtttaacctttctcttcatagagcagtttggaaacactctgtttgtaaagtctgcaagtggatattcagacctccttgaggtcttcgttggaaacgggatttcttcatattatgctagacagaagaattctcagtaacttccttgtgttgtgtgtattcaactgacagagttgaactttcatttagagagagcagatttgatacactgtttttgtggaatttgcaagtggagatttcaagcgctttgcggccaaaggcagaaaaggaaatatcttcgtataaaaactagacagaatcattctgagaaactgctctgcgatgtgtgcgttcaactctcagagtttaacttttcttttcattcagcagtttggaaacactctgtttgtaaagtctgcacgtggatattttgaccacttagaggccttcgttggaaacgggtttttttcctgtaaggctagacagaagaattcccagtaacttccttgtgttgtgtacattcaactcacatagttgaacgttcccttagacagagcagatttgaaacactctttttgtgcaattggcaaatggagatttcaagcgctttaaggtcaatggcagaaaaggaaatatcttcgtttcaaaactagacagaatgattctcagaaactcctttgtgatgtgtgcattcaactcacagagtttaacctttcttttcatagagcagttaggaaacactctgtttgtaaagtctgcaagtggatattcagacctctttgaggccttcgttggaaacgggatttcttcatattctgctagacagaagaattctcagtaacttccttgtgttgtgtgtattgaactcgcagagttgaacgatcctttacacagagcagacttgaaacactctttttgtggaatttgcaagtggagatttcagccgctttgaggtcaatagtagaaaaggaaatatcttcgtagaaaaactagacagaatgattctcagaatctcctttgtaatgtgtgcgttcaactcacagagtttaacctttcttttcataaagcagttaggaaacactctgtttgtaatgtctgcaagtggatattcagacctctttgaggccttcgttggaaacgggatttcttcatattctgctagacagaagaattcccagtaacttctttgtgttgtgtgtgttcaactcacagagttgaactttcatttacacagagcagatttgaaacactctttttgtggaatttgcaagtggagatttcaagcgctttgaggccaaaggcagaaaaggaaatatcttcgtataaaaactggacagaatcattctcagaaactgctctgcgatgtgtgcgttcaactctcagagtttaacttttcttttcattcagcagtttggaaacactctgtttgtaaagtctgcacgtggataatttgaccacttggaggccttctttggaaacgggtttttttcctgtaaggctagacagaagaattcccagtaacttccttgtgttgtgtgcattcaactcacagagttgaaagttcccttagacagagcagatttgaaacactctatttgtgcaatttgcaagtgtagatttcaagcgctttaaggtcaacggcagaaaaggaaatatcttggtttcaaaactagacagaatgattctcagaatcttctttgtgatgtgtgcgttcaactcacagagtttaacctttcttttcatagagcagttaggaaacactctgtttgtaaactctgcaagtggatattcagacctctttgaggccttcgttggaaacgggatttcttcatactgtgctatacagaagaattctcagtaacttccttgtgttgtgtgtattcaactcacagagttgaacgaccctttacacagagcggacttgaaacactctttttgtggaatttgcaagtggagatttcagccgcgttgaggtcaatggtagaaaaggaaatatcttcgtataaaaactagacagaatgattctcagaaacttcattgtgatgtgtgcgttcaactcacagagtttaacctttcttttcatagagcagttaggaaacactctgtttgtaaactctgcaagtggatattcagaccactttgaggccttcgttggaaacgggatttctccatactgtgctagacagaagaattctcagtaacttccttgtgttgtgtgtattcaactcacagagttgaacgatgctttacacagagcggacttgaaacactcgttttgtggaatttgcaagtggagatttcagccgatttgaggtcaatggtagaaaaggaaatatcttcgtataaaaactagacagaatgattctcataaactcctttgtgatgtgtatgttcaactcacagagtttaacttttctattcatagagtagttaggaaacactctgtttgtaaagtctgcaagtggatattttgacctctttgaggcctccgttggaaacgggttttcttcatgtaaggctagacagaagaattctcagtaacttccttctgttgtgtacattcaactcacagagttgaacgttcccttagacagagcagatttgaaacactctttttgtgcaattggcaagtggagatttcaagcgctttaaggtcaatggcagaaaaggaaatatcttcgtttcaaaacgagacagaatcattctcagaaactgctctgcgatgtgtgcgttcaactctcagagtttaacttttcttttcattcagcagtttggaaacactctgtttgtaaagtctgcacgtggataatttgaccacttagaggccttctttggaaacgggtttttttcatgtaaggctagacagaagaattctcagtaactttccttgtgttgtgtgtattcaactcacagagttgaacgatcctttacacagagcagacttgtaacactctttttgtggaatttgcaagtggagatttctgccgctttgaagtcaaaggtagaaaaggaaatatcttcctataaaaactagacagaatgattctgagaaactcctttgtgatgtgtgcattcaactcacagagtttaacctttcttttcatagagcagttaggaaacactctgtttgtaaagtctgcaagtggatattcagacctccttgaggccttcgttggaaacgggatttaatcatattctgctagacagaagaattctcagtaacttccttttgttgtgtgtattcaactcacagagttgaatgatcctttacacagagcagacttgaaacactctttttgtggaatttgcaagtggagatttcagccgctttgagttcaatggtagaataggaaatatcttcctatagaaactagacagaatcattctcagaagctgctctgcgatgtgtgcgttcaactctcagagtttaacttttcttttcattcagcagtttggaaacactctgtttgtaaagtctgcacgtggataatttgaccacttagaggccttcgttggaaacgggtttttttcatgtaaggctagacagaagagttctcagtaacttcccttgtgttgtgtgtattcaactcacacagttgaacgatcctttacagagagcagacttgtaacactctttttgtggaatttgcaagtggagatttcagccgctttgaagtcaaagtagaaaaggaaatatcttcctataaaaactagacagaatcattcccacaaactgcgttgtgatgtgttcgttcaactcacagagtttaacctttcttttcatagagcatttaggaaacactctgtttgtaaagtctgcaagtggatattcagacctctttgaggccttcgttggaaacgggtttttttcatataaggctagacagaagaattctcagaaacttccttgtgttgtgtgtcttcaactcacagagttgaacgatcctttacacatagcagacttgaaacacactttttttggtattttcaagtggagatttcagccgctttgaggtcaatggtagaaaaggaaatatcttcgtataaagactagacagaatgattctcagaaactcctttgtgatgtgtgcgttgaactcacagagtttaacgtttcttttcatagagcagttaggaaacactctgtttgtaaagtctgcaaggggatattcagacctctctgaggccttcgttggaaacgggatttcttcatattctgcttcacagaagaattctcagtaacttccttgtgttgtgtgtattcaactgacagagttgaactttcatttagacagagcagatttgaaaagctctttatgtggaatttgcaattggagatttcaagcgctttgaggccaaagacagaaaaggaaatatcttcgtataaaaactagacagaatcattctcagaaactgctctgcgatgtgtgcgttcaactctcagagtttaacttttcttttcattcagcagtttggaaacactctgtttgtaaagtctgcacgtggataacttgaccacttagaggccttcgttggaaacgggtttttttcatgtaaggctagacagaagaattcccagtaacttccttgtgttgtgtgcattcaactcacagagttgaacgttcccttagacagagcagatttgcaacactctatttgtgcaatttgcaagtgtagatttcaagcgctttaaggtcaatggcagaaaaggaaatatcttcgtttcaaaactagacagaatcattcccacaaactgcgttgtgatgtgttcgttcaactcacagagtttaacctttccgttcatagagcagttaggaaacacactgtttgtaaagtctgtaagtggatactctgacatcttgtggccttcgttggaaacgggatttcttcatattctgctagacagaagaattctcagtaacttccttgttttgtgtgtattcaactcacagagttgaacgatcctttacacagagcatacttgaaacactcttcttgtggaatttgcaagtggagatttcaaccgctttgaggtcaatggtagaataggaaatatcttcctatagaaactagacagaatgattctcagaaacttctttgtgatgtgtgcgttcaactcacagagtttaacctttcttttcatagagcagttaggaaacactttgtttgtaaagtctgcaagtggatattcagacctctttgaggccttcgttggaaacgggatttcttcatactatgctagacagaagaattcccagtaacttccttgtgttgtgtgtgttcaactcacagagttgaactttcatttacacagagcagatttgaaacactctttttgtggaatttgcaaatggagatttcaagcgctttgaggtcaaaggcagaaaagaaaatatcttcgtataaaaactagacagaatcattctcagaaactgctgcgtgatgtgtgcgttcaactctcagagtttaacttttcttttcattcagcggtttggaaacactctgtctgtaaagtctgcacgtggatattttgaccacttagaggccttcgttggaaacgggtttttttcatgtaaggctagacagaagaattcccagtaacttccttgtgttgtgtgcattcaactcacagagctgaacattcccttgacagagcagatttgaaacactctatttgtgcaatttgcaagtgtagatttcaagcgctttaaggtcaatggcagaaaaggaaatatcttcgtttcaaaactagacagaatgattctcagaaactcctttgtgatgtgtgcgttcagctaacagagtttaacctttcttttcatagagcagttcggaaacactctgtttgtaaagtctgcaagtggatattcagacctctttgaggccttcgttggaaacgggatttcttcatattctgctagacagaagaattctcagtaacttccttgtgttgtgtgtattcaactcacagagttgaacgattctttacacagagcagacctgaaacactctttttgtggaatttgcaagtggagatttcagccgctttgaggtcaatggtacaaaaggaaatatcttcgtataaagactagacagaatgattctcagaaactcctttgtgatgtgtgtgttcaactcacagagcttaacctttcttttcatagagcagttagtaaacactctgtttataaagtctgcaagtggatattcagacccctttgaggccttcgttggaagcgggatttcttcatattatgctagacagaagaattctcagtaacttccttgtgttgtgtgtattcaactgacagagttgaacttttatttagagagagcagatttgaaacactgtttttgtggaatttgcaagtggagatttcaagcgctatggggccaaaggcagaaaaggaaatatctttgtataaaaactagacagaatgattctcagaaactgctgcgtgatgtgtgcgttcaactctcagagtttaacttttcttttcattcagcggtttggaaacactctgtttgtaaagtctgcacgtggatattttgaccacttagaggccttcgttggaaacgggtatttttcatgtaaggctagacagaagaattcccagtaactttccttgtgttgtgtacattcaactcacagagttgaacgttcccttagacagagcagatttgaaacactctttttgtgcaattggcaagtggtgatttcagccgctttgaggtcaatggtagaaaaggaaatatcttcgtataaaaactagacagaatcattcccacaaactgcgttgtgatgtgttcgttcaactcacagagtttaacctttcttttcatagagcagttaggaaacagtctgtttgtcaattctttaagtggatattctgacatcttgtggccttcgttggaaacgggatttcttcatattctgctagacagaagaattctcagaatcttccttgtgttgtgtgtattcaactcacagagttgaacgatcctttacacagagcagacttgaaacactctttttgtgcaatttgcaagtggagatttcaaccgctttgaggtccatggtagaaaaggaaatatcttcgtataaaaactagacagaatgattctcagaaactcctttgtgatgtgtgcgttcaactcacagagtttaacctttcttttcatagagcagttaggaaacactctgtttgtaaagtctgcaagtggatattcagacctccttgacgccttcgttggaaacgggatttcttcatattatgctagacagaagaattctcagtaacttccttgtgttgggtgtattcaactgacagagttgaactttcctttagacagatcagatttgaaacactctttttgtggaatttgcaaggtgagatttcaaccgctttgaggccaaaggcagaaaaggaaatatcttcctttaaaaactagacagaatcattctcagaaactgctctgtgatgtgtgcgttcaactctcagagtttaacttttctgttcattcagcagtttgtaaacactctgtttgtaaagtctccacgtggatattttgaccacttagaggccttcgttggaaacgggtttttttcatgtaaggctagacagaagaattcccagtaacttccttgtgttgtgtgcattcaactcacagagttgaacgttcccttagacagagcagatttgaaacactctatttgtgcaatttgcaagtgtagatttcaagcgctttaaggtcaacggcagaaaaggaaatatcttggtttcaaaactagacagaatgattctcagaaacttctttgtgatgtctgcgttcaactcacagagtttaacatttcttttcatagagcagttaggaaacactctgtttgtaaagtctgcaattggatattcagacctctttgaggccttcgttggaaacgggatttcttcatactatgctagacagaagaattctcagtaacttccttgtgttgtgtgtattcaactcacagagttgaacgatcctttacacagagcagacttgtaacactctttttgtggaatttgtaagtggagatttcagccgctttgaagtcaaaggtagaaaaggaaatatcttcctataaaaactagacagaatgattctcacaaactcctttgtgatgtgtgcgttcaactcacagagtttaacctttcttttcatagagcagttaggaaacactctgtttgtaaagtctgcaagtggatattcagacatctttgaggccttcgttggaaacgggatttcttcatgttctgctagacagaagaattctcagtaacttccttgtgttgtgtgtattcaactcacagagttgaacgatcctttacacagagcagacttgtaacactctttttgtggaatttgcaagtggagatttctgccgctttgaggtcaatggtagaaaaggaaatatcttcctataaaaactacacagaatgattctcagaaactcctttgtgatgtgtgcgttcaactcacagagtttaacttttcttttcatagagcagttagcaaacactctgtttgtaaattctgcaagtggatattcagacctctttgaggccttcgttggaatcgggatttcttcaaattctgctaggcagaagaattcccagtaacttccttgtgttgtgtgtgttcaactcacagagttgaactttgatttacacagagcagatttgaaacactctttttgtggaatttgcaagtggagatttcaagcgctttgaggccagaggcagaaaaggaaatatcttcgtataaaaactagacagaatcattctcagaaactgctctgcgatgtgtgcgttcaactctcagagtttaacttttcttttcattcagcagtttggaaacactccgtttgtaaagtctgcacgtggatattttgaccacttagaggccttcgttggaaacgggtttttttcctgtaaggctagacagaagaattcccagtaacttccttgtgttgtgtacattcaactcacagagttgaacgttcccttagacagagcagatttgaaacactctttttgtgcaattggcaaatggagatttcaagcgctttaagttcaatggcagaaaaggaaatatcttcgtttcaaaactagacagaatcattcccacaaactgcgttgtgatgtgttcgttcaactcacagagtttaacctttctgttcatagagcagttaggaaacactctgtttgtaaagtctgacagtggatattctgacatcttgtggccttcgttggaaacaggatttcttcatattctgctagacagaagaattctcagtaacttccttgtgttgtgtgtattcaactcacagagtttaatgatcctttacgcagagcagacttgaaacaatctttttgtggaatttgcaagtggagatttcagccgctttgatgtcaatggtagaataggaaatatcttcctatagaaactagacagaatgattctcagaaactcctttgtgatgtgtgcgttcaactcacagagtttaacctttcttttcatagagcagttaggaaacactctgtttgtaatgtctgcaagtggatattcagacctctttgaggcctttgttggaaacgggatttcttcatattgtgctagacagaagaattcccagtaacttccttgtgttgtgtgtgttcaactcacagagttgaactttcatttacacagagcagatttgaaacactctttttgtggaatttgcaaatggaggtttcaagcgctttgaggccaaaggcagaaaaggaaatatcttcgtataaaaactagacagaaccatgctgagaaactgctctgcgatgtgtgcgttcaactctcagagtttaacttttcttttcattcagcagtttggaaacactctgtttgtaaagtctgcacgtggataacttgaccacttagaggccttcgttggaaacgggtttttttcatgtaaggctagacagaagaattcccagtaacttccttgtgttgtgtacattcaactcacagagttgaacgttcccttagacagagcagatttgaaacactctttttgtgcaattggcaaatggagatttcaagcgctttaagttcaatggcagaaaaggaaatatcttcgtttcaaaactagacagaatcattcccacaaactgcgttgcgatgtgttcgttcaactcacagagtttaacatttcttttcatagagcacttaggaaacagtctgtttgtaaattctgtaagtggatattctgacatcttgtggccttcgttggaaacaggatttcttcatattctgctagacagaagaattcccattaacttccttgtgttgtgtgtgttcaactcacagagttgaactttcatttacacagagcagatttgaaacactctttttgtggaatttgcaaatggagatttcagccgcgttgaggtcaatggtagaaaaggaaatatcttcgtttcaaaactagacagaatgattctcagaaactcctttgtgatgtgtgcgttcaactcacagagtttaacctttcttttcatagagcagttaggaaacactctgtttgtaaagtctgcaagtggatattcagacctctttgaggccttcgatggaaacgggtttttttcatataaggctagacagaagaattcccagtaacttccttgtgttgtgtgtgttcaactcacagagttgaactttcatttacacagagcagatttgaaacactctttttgtggaatttgcaaatggagatttcaagcgctttgaggccaaaggcagaaaaggaaatgtctacgtttcaaaactagacagaatcattctcagaaactgctgcttgatgtgtgcgttcaactctcagagtttaacttttcttttcattcagcggtttggaaacactctgtttgtaaagtctgcacgtggatattttgaccacttagaggccttcgttggaaacgggtttttttcatgtaaggctagacagaagaattcccagtaacttccttgtgttgtgtacattcaactcacagagttgaacgttcccttagacagagcagatttgaaacactctttttgtgcaattggcaagtggagatttcaagcgctttaaggtcaatggcagaaaaggaaatatcttcgtttcaaaactacacagaatgattctcagaaacttcattgtgatgtgtgcgttcaactcacagagtttaacctttcttttcatagagcagttgggaaacagtctgtttgtaaattctataagtggatattctgacatcttgtggccttcgttggaaacgggatttcttcatattctgctagacagaagaattctcagtaacttcgttgtgttgtgtgtattcaactcacagagttgaacgatcctttacacagagcagacttgaaacacgctttttgtggaatttgcaagtggagatttcagccgctttgaggtcaatggtagaaaaggaaatatcttcgtataaagactagacagaatgattctcagaaaatcttttgtgatgtgtgcgttcaactcacagagtttaacttttcttctcatagagcagttaggaaatactctgtttgtaaagtctgcaagtggatattcagacctctttgaggccttcgttggaaacgggatttcttcatattatgctagacagaagaattctcagtaacttccttgtgttgtgtgtattcaactgacagcgttgaactttcatttagagagagcagatttgaaacactgtttttgtggaatttgcaagtggagatttcaagcgctttggggccaaaggctgaaaaggaaatatcttcgtataaaaactagacagaaatcattctcagaaactgctgcgtgatgtgtgcgttcaaccctcagagtttaacttttcttttcattcagcggtttggaaacactctgtttgtaaagtctgcacgtggatattttgaccacttagaggccttcgttggaaacgggattttttcatgtaaggctagacagaagaattcccagtaacttccttgtgttgtgtgcattcaactcacagagttgaacgttcccttagacagagcagatttgaaacactctatttgtgcaatttgcaagtgtagttttcaagctctttaaggtcaacggcagaaaaggaaatatcttggtttcaaaactagacagaatcattcccacaaactgcgttgtgatgtgttcgttcaactcacagagtttaacctttctgttcatagagcagttaggaaacactctgtttgtaaagtctgcaagtggatattctgacatcttgtggccttcgttggaaacgggatttcttcatattctgctagacagaagaattctcagtaacttccttgtgttgtgtgtattcaactcacagagttgaacgatcctttacacagagcagacttgaaacactccttttgtggaatttgcaagtggagatttcagccgctttgaggtcaaaggtagaataggaaatatcttcctatagaaactagacagaatgattctcagaaactcctttgtgatgtgtgtgttcaactcacagagtttaacctttcttttcatagagcagttaggaaacactctgtttgtaaagtctgcaagtggatattcagacccctttgaggccttcgttggaaacgggatttcttcatattatgctagacagaagaattctcagtaacttccttctgttgtgtgtattcaactgacagagttgaactttcatttagagagagcagatttgaaacactgtttttgtggaatttgcaaatggagatttcaagcgctttggtgccaaaggcagaaaaggaaatatcttcgtataaaaactagacagaatcattctcagaaactgctgcgtgatgcgtgcgttcaactctcagagtttaacttttcttttcattcagcggtttggaaacactctgtttgtaaagtctgcaagtggatattcagacctctttgaggccttcgttggaaacgggatttcttcctattatgctcaacagaagaattcccagtaacttccttgtgttgtgtgcattcaactcacagagttgaacgttcccttagacagagcagatttgaaacactctctttgtgcaatttgcaagtgtagatttcaagcgctttatggtcaacggcagaaaaggaaatatcttcgtttcaaaactagacagaatcattcccacaaactgcgtagtgatgtgttcgttcaactcacagagtttaacctttcttttcatagagcagttaggaaacagtctgtttgtcaattctgtaagtggatattctgacatcttgtggccttagttggaaacgggatttcttcatattctgctagacagaagaattcccagtaacttccttgtgttgtgtgtattcaactcacagagttgaaagatcctttacacagagcagacttgtaacactctttttgtggaatttgcaagtggagatttcagccgctttgaagtcaaaggtagaaaaggaaatatcttcctataaaaactagacagaatgattctcagaaactcctttgtgatgtgtgcgttcaacccacagagtttaacctttcttttcatagagcagttaggaaacactctgtttgtaaagtctgcaagtggatattcagacctctttgaggccttcgttggaaaagggatttcttcatattctgctggacagaagaattccccgtaacttccttgtgttgtgtgtgttcaactcacagagttgaactttcatttacacagagcagatttgaaacactctttttgtggaatttgcaagtggagatttcaagcgctttgaggccaaaggcagaaaaggaaatatcttcgtataaaaactagacagaatcattctcagaaactgctctgtgatatgtgcgttcaactctcagagtttaacttttcttttcattcagcagtttggaaacactctgtttgtaaagtctgcacgtggatattttgaccacttagaggccttcgttggaaacgggttttttttcatgtaaggctagacagaagcattcccagtaacttccttgtgttgtgtgcattcaactcacagagatgaacgttcccttagacagagcagatttgaaacactctatttgtgctatttgcaagtgtagatttccagcgctttaaggtcaatggcagaaaaggaaatatcttcgtttcaaaactagacagaatgattctcagaaactcctttgtgatgtgtgcgttcaactcacagagtttaacttttcttttcatagagcagttaggaaacactctgtttgtaaagtgtgcaagtggatattcagacctccttgaggccttctttggaaaagggatttcttcatattatgctagacagaataattctcagtaacttccttgtgttgtgtgtattcaactcacagagttgaaggatcctttacagagagcagacttgaaacactctttttgtcgaatttgcaagtggagatttcagccgctttgaggtcaatggtagaataggaaatatcttcttatagaacctagacaaaatgattctcagaaacccctttgtgatgtgtgcgttccactcacagagtttaacctttcttttcatagagcagttaggaaacactctgtttgtaaagtctgcaaggggatatttagacctctttgaggccatcgttggaagcgggatttcttaatattctgctagacagaataattctcagtaacttccttgtgttgtgtgtattcaactgacagagttgaactttcatttagagagagcagatttgaaacactgtttttgtggaatttgcaagtagagatttcaagcgctttggggccaaaggcagaaaaggaaatatcttcgtataaaaactagacagaatcattcccacaaactgcgttgtgacgtgttcgttcaactcacagagtttaacctttcttttcatagagcagttaggaaacactctgttggtaaattctgtaagtggatattctgacatcttgtggccttcagtggaaacgggatttcttcatattctgctagacagaagaattcccagtaacttccttgtgttgtgtacattcaactcacagagttgaacgttcccttagacagagcagatttgaaacactctttttgtgcaattggcaagtggagatttcaagcgctttgaggtcaatggcagaaaaggaaatatcttcgtttcaaaactagacagaatcattcccacaaactgcgttgtgatgtgttcgttcaactcacagagtttaacctttctgttcatagagcagttaggaaacactctgtttgtaaagtctgtaagtggatattctgacatcttgtggccttcgttggaaacgggatttcttcattttctgctagacagaagaattctcagtaacttccttgtgttgtgtgtattcaactcgcagagttgaacgatcctttacacagagcagacttgaaacactctttttgtggaatttgcaagtggagatttcagccgctttgaggtcagtggtagaaaaggaaatatcttcgtataaagactagacagaatgattctcagaaactcctttgtgatgtgtgtgttcaactcacagagtttaacctttcttttcatagagcagttagtaaacactctgtttataaagtctgcaagtggatattcagacctccttgaggccttcgttggaaacgggatttcttcatattatgctagacagaagaattctcagtaacttcctcgtgttgtgtttattcaactgacagagttgaactttcatttagagagagcagatttgaaacactgtttttgtggaatttgcaagtggagatttcaagcgctttggggccaaaggcagaaaaggaaatatcttcgtataaaaactagacagaatcattctcagaaactgctgcgtgatgggtgcgttcaactctcagagtttaacttttcttttcattcagcggtttggaaacactctgtttgtaaagtctgcacgtggatattttgaccacttagaggccttcgttggaaacgggtttttttcatgtaaggctagacagaagaattcccagtaacttccttgtgttgtgtacattcaactcacagagttgaacgttctcttagacagagcagatttgaaacactctttttgtgcaattggcaaatggagatttcaagcgctttaaggtcaatggcagaaaaggaaatatcttcgtttcaaaactagacagaatcattcccacaaactgcgttgtgatgtgttcgttcaactcacagagtttaacctttctgttcatagagcagttaggaaacactctgttttgtaaagtatgcaagtggatattcagacctccttgaggccttcgttggaaacgggatttcttcatattctgctagacacgaagaattctcagtaacttccttgtgttgtgtgtattcaactcacagagttgaacgatcctttacacagagcagacttgaaacactctttttgtggaatttgcatgtggagatttcagccgctttgaggtcaatggtagaaaaggaaatatcttcgtataaaaactagacagaatgattctcataaactcctttgtgatgtgtgcgttcaactcacagagtttaacctttcttttcatagagcagttaggaaacactctgtttgtaaaatctgcaagtggatattcagacccctttgaggccttcgttggaaacgggatttcttcatattctgctagacagaagaattcccagtaacttccttgtgttgtgtgtgttcaactcacagagttgaactttcatttacacagagcagatttgaaacactctttttgtggaatttgcaagtggagatttcaagcgctttgaggccaaaggcagaaaaggaaaatatcttcgtttcaaaactagacagaatcattctcagaaactgctctgcgatgtgtacattcaactctcagagtttaatttttcttttcattcagcagtttggaaacactctctttgtaaagtctgcacgtggatattttgaccacttagaggccttcgttcgaaacgggttttattcttgtaaggctagacagaagaattcccagtaacttccttgtgttgtgtgcattcaactcacagagttgaacgttcccttagacagagcagatttgaaacactctatttgtgcaatttgcaagtgtagatttcaagcgctttaaggtcaacggcagaaaaggaaatatcttcgttttaaaactagacagaatcattcccacaaactgcgttgtgatgtgttcgttcaactcacagagtttaacctttctgttcatagagcagttaggaaacactctgtttgtaaagtctgtaagtggatattctgacatattgtggccttcgttggaaacgggatctcttcatattctgctagacagaagaattctcagtaactgccttgtgttgtgtgtattcaactcacagagttgaacgatcctttacacagagcagacttgaaacactccttttgtggaatttgcaagtggagatttcagccgctttgaggtcaatggtagaataggaaatatcttcctgtagaaactagacagattgattctcagaaactcctttgtgatgtgtgcgttcaactcacagagtttaacctttcttttcatagagcagttaggaaacactctgtttgtaaagtctgcaagtggatattcagacctccttgagaccttcgttggaaacgggatttcttcctattatgctagacagaagaattcccagtaacttccttgtgttgtgtgtgttcaactcacagagttgagctttcatttacacagagcagatttgaaacactctttttgtggaatttgcaaatggagatttcaagcgctttgaggccaaaggcagaaaaggaaatatcttcgtataaaaactagacagaatcattctcagaaactgctctgtgatgtgtgcgttcaactctcagagtttaacttttcttttcattcagcagtttggaaacactctgtttgtaaagtctgcacgtggataattttaccacttagaggccttcgttggaaacgggtttttttcatgtaaggctagacagaagagttctcagtaacttccttgtgttgtgtgtattcaactcacagagttgaacgatcctttacacagagcagacttgtaacactctttttgtggaatttgcaagtggagatttcagccgctttgaagtcaaagtagaaaaggaaatatcttcctataaaaactagacagaatcattcccacaaactgcgttgtgatgtgttcgttcaactcacagagtttaaactttctgttcatagagcagttaggaaacactctgtttgtaaagtctgcaagtggatattcagacctccttgaggccttcgttggaaacgggatttcttcatattctgctagacagaagaattctcagtaacttccttgtgttgtgtgtattcaactcacagagttgaacgatcctttacagagagcagacttgaaacactctttttgtggaatttgcaagtggagatttcagccgctttgaggtcaatagtagaaaaggaaataacttcgtagaaaaactagacagaatgattctcagaaactcctttgtgatgtgtgtgttcaactcacagagtttaacctttcttttcatagagcagttagtaaacactctgtttataaagtctgcaagtggattttcagacccctttgaggccttcgttggaaacgggatttcttcatattatgctagacagaagaattcccagtaacttccttgtgttgtgtgtgttcaactcacagagttgaactttgatttacacagagcagatttgaaacactctttttgtggaatttgcaagtggagatttcaagcgctttgaggccaaaggcagaaaaggaaataccttcgtataaaaactagacagaatcattctcagaaactgctctgtcatgtgtgcgttcaactctgagagtttaaattttcttttcattcagcagtttggaaacactctgtttgtaaagtctgcacgtggatattttgaccacttagaggccttcgttggaaacgggtttttttcatgtaaggctagacagaagaattcccagtaacttccttgtgttgtgtgcattcaactcacagagttgaacgttcccttagacagagcagatttgaaacactctatttgtgcaatttgcaagtgtagttttcaagctcttttaggtcaacggcagaaaaggaaatatcttggtttcaaaactagacagaatcattcccacaaactgcgttgtgatgtgttcgttcaactcacagagtttaacctttctgttcatagagcagttaggaaacactctgtttgtaaagtctgtaagtggatattctgacatctggtggccttcgttgggaacgggatttcttcatattctgctagacagaagaattctcagtaacttccttgtgttgtgtgtattcaactcacagagttgaacgatcctttacacagagcagacttgaaacactctttttgtggaatttgtaagtggagatttcagccgctttgaggtcaatggtagaataggaaatatcttcctatagaaactagacagaatgattctcagaaactcctttgtgatgtgtactttcaactcacagagtttaacctttcttttcatagagcagttaggaaacactctgtttgtaaagtctgcaagtggatattcagacctctttgaggccttcgttggaaacgggtttttttcatataaggctagacagaagaattctcagtaacttccttgtgttgtgtgtattcaactgacagagttgaactttcatttagagagagcagatttgaaacactgtttttgtggaatttgcaagtggagatttcaagcgctttggggccaaaggcagaaaaggaaatatcttcggataaaaactagacagaatcattctcagaaactgctgcgtgatgtgtgtgttcaactctcagagtttaacttttcttttcattcagcggtttggaaacacactgtttgtaaagtctgcacgtggatattttgaccacttagaggccttcgttggaaacgggttttttgcatgtaaggctagacagaagaattcccagtaacttccttgtgttgtgtacattcaactcacagagttgaacgttccccttagacagagcagatttgaaacactctttttgtgcaattggcaagtggagatttcaagcgctttaaggtcaatggcagaaaaggaaatatcttcgtttcaaaactagacagaatgattctcagaatctcctttgtgatgtgtgcgttcaactcacagagtttaacctttcttttcatagagcagttaggaaacactctgtttgtaaagtctgcaagtggatattcagacatccttgaggctttcgttggaaacgggatttcttcatattctgtttgaaagaagaattctcagtaacttccttgtgttgtgtgtattcaagtcacagagttgaacgatcctttacacagagcagacttgaaacactctttttgtggaatttgcaagtggagatttcagccgctttgaggtcaatggtagaataggaaatatcttcctatagaaactagacagagtgattctcataaactcctttgtgatgtgtgcgttcaactcacagagtttaacctttcttttcatagagcagttaggaaacactctgtttgtaaagtctgcaagtggatattcagacctccttgaggccttcgttggaaacgggatttcttcatattctgctagactgaagaattctcagtaacttccttgtgttgtgtgtattcaactcacagagttgaacgatcctttacacagagcagacatgaaacactctttttgtggaatttgcaagtggagatttcagccgctttgaggtcaatggtagaataggaaatatcttcctatagaaactagacagaatgattctcagaaactcctttgtgatgtgtgcgttcaactcacagagttcaacctttcttttcatagagcagttaggaaacactctgtttgtaaagtctgcaagtggatattcagacctctttgaggccttcgttggaaacgggatttcttcatattatgctagacagaagaattctcagtaacttccttgtgttgtgtgtattcaactcacagagttgaacttccatttacacagagcagatttgaaacactctttttgtggaatttgcaagtggagatttcaagcgctttgaggccaaaggcagaaaaggaaatatcttcgtttcaaaactagacagaatcattctcagaaactgctctgcgatgtgtgcgttcaactctcagagtttaacttttcttttcattcagcagtttggaaacactctgtttgtaaagtctgcacgtggataatttgaccacttagaggccttcgttggaaacgggtttttttatgtaaggctagacagaagaattcccagtaacttccttgtgttgtgtacattcaactcacagagttgaacgttcccttagacagagcagatttgaaacactctttttgtgcaattggcaagtggagatttcaagcgctttgaggtcaatggcagaaaaggaaatatcttcgtttcaaaactagacagaatcattcccaaaaactgcgttgtgatgtgttcgttcatctcacagagtttaacctttcttttcatagagcagttaggaaacagtctgtttgaaaattctgtaagtggatattctgacatcttgtggccttcgttggaaacgggatttcttcatattctgctagacagaagaattctcagtaacttccttgtgttgtgtgtattcaactcacagagttgaacgatcctttacacagagcagacttgaaacactctttttgtggaatttgcaagtggagatttcagccgctttgaggtcaatagtagaaaaggaaatatcttcgtaggaaaactagacagaatgattctcagaaactcctttgtgatgtgtgcgttcaactcaaagagtttaacttttcttttcatagagcagttaggaaacactctgtttgtaaagtctgcaagtggatattcagacctctttgaggccttcgttggaaacgggatttcttcatattatgctagagagaagaattctcagtaacttccttttgttgtgtgtattcaactgacagagttgaactttcatttagacagagcagatttgaaacactctttttctggaatttgcaggtggagatttcaagcgctttgaggccgaaggcagaaaaggaaatatcttcgtataaaaactagacagaatcattctcagaaactgctctgcgatgtgtgccttcagcgctcagagtttaacttttcttttcattcagcagtttggaaacactctgtttgtaaagtctgcacgtggatattttgaccacttagaggccttcgttggaagcgggtttttgtcatgtaaggttagacagaagaattcccagtaacttccttgtgttgtgtgcattcaactcacagatttgagcgttcccttagacagagcagatttaaaacactctatttgtgcaatttgcaagtgtagatttcaagcgctttaaggtcaatggcagaaaaggaaatatcttcgtttcaaaactagacagaatcattcccacaaactgcgttgtgaggtgttccgtaaactcacagagtttaacctttcttttcatagagcagttaggaaacagtctgtttgtaaattctgtaagtggatattctgacatcttgtggccttcgttggaaacgggatttcttcatattctgctagacagaagaattctcagtaacttccttgtgttgtgtgtattcaactcacagagttgaacgatcctttacacagagcagacttgaaacactctttttgtggaatttgcaaatggagatatcagccgctttgaggtcaatggtagaataggaaatatcttcctatagaaactagacagaatgattctcagaaactcctttgtgatgtgtgcgttcaactcacagagtttaacctttcttttcatagagcagttaggaaacactctgtttgtaaagtctgcaagtggatattcagacctccttgaggctttcgttggaaacgggatttcttcatattctgctagaaagaagaattcccagtaacttccttgtgttgtgtgtgttcaactcacagagttgaactttcatttacacagagcagatttgaaacactctttttgtggaatttgcaagtggagatttcaagcgatttgaggccaaaggcagaaaaggaaatatcttcgtttcaaaactagacagaatcattctcagaaactgctctgcgatgtgtgcgttcaactctcagagtttaacttttcttttcattcagcagtttgaaaacactctgtttgtaaagtctgcacgtgtatattttgaccacttagaggccttcgttggaaacgggtttttttcctgtaaggctagacagaagaattcccagtaacttcccttgtgttgtgtgcattcaactcacagagttgaacgttcccttagacagagcagatttgaaacactctatttgtgcaatttgcaagtgtagttttcaagctctttaaggtcaacggcagaaaaggaaatatcttcgtttcaaaactagacagaatcattctcacaaactgcgttgtgatgtgttcgttcatctcacagagtttaacctttcttttcatagagcagttaggaaacagtctgtttgtaaattctgtaagtggatattctgacatcttgtggccttcgttggaaacgggatttcttcatattctgctagacagaagaattctcagtaacttccttgtgttgtgtgtattcaactcacagagttgaacgatcctttacactgagcagacttgaaacattctttttgtggaatttgcaagtggagatttcagccgctttggggtcaatggtagaataggaaatatcttcgtagaaaaactagacagaatgattctcagaaacttctttgtgatgtgtgcgttcaactcacagagtttaacctttcttttcatggagcagttaggaaacactctgtttgtaaactctgcaagtggatattcagacctctttgaggccttcgttggaaacgggatttcttcatactatgctagacagaagacttctcagtaacttccttgtgttgtgtgtattcaactcacagagttgaacgatcctttacacagagcggacttgaaacactctttttgtggaatttgcaagtggagatttcagccgcgttgaggtcaatggtagaaaaggaaatatcttcttataaaaactagacagaatgattctcagaatctcctttataatgtgtgcgttcaactcacagagtttaacctttcttttcataaagcagttaggaaacactctgtttgtaatgtctgcaagtggatattcagacctctttgaggccttcgttggaaacgggatttcttcatattctgctagacagaagaattcccagtaacttccttgtgttgtgtgtgttcaactcacagagttgaactttcatttacacagagcagatttgaaacactctttttgtggagtttgcatgtggagatttcaagcactttgaggccaaaggcagaaaaggaaatatcttcgtataaaaactagacagaatcattctcagaaactgctgcgtgatgtgtgtgttcaaccctcagagtttaactttccttttcattcagcggtttggaaacactctgtttgtaaagtctgcacgtggatattttgaccacttagaggccttcgttggaaacgggtttttttcatgtaaggctagacagaagaattcccagtaacttccttgtgttgtgtgcattccactcacagagttgaacgttcccttagacagagcagatttgaaacactctatttgtgcaatttgcaagtgtagatttcaagctctttaaggtcaatggcagaaaaggaaatatcttcgtttcaaaactagacagaatcattcccacaaactgcgttgtgatgtgttcgttcaactcacagagtttaacctttctgttcatagagcagttaggaaacactctgtttgtaaagtctgtaagtggatattctgacattttgtggccttcgttggaaatgggatttcttcatattctcctagacagaagaattctcagtaacttccttgtgctgtgtgtattcaactcacagagttgaacgatcctttacacagagcatacttgaaacactcttcctgtggaatttgcaactggagatttcagccgctttgaggtcaatggtagaataggaaatatcttcgtataaaaactagacagaatgattctcagaaactcctttgtgatgtgtgtgttcaactcacagagtttaacctttcttttcatagagcagttagtaaacactctatttataaagtctgcaagtggatattcagacccctttgaggccttcgttggaaacgggatttcttcatattatgctagacagaagaattctcagtaacttccttgtgttgtgtgtattcaactgacagagttgaactttcattttgagagagcagatttgaaatactgtttttgtggaatttgcaagtggagatttcaaacgctttggggccaaaggcagaaaaggaaatatcttcgtataaaaactagacagaatcattctcagaaactgctgtgtgatgtgtgcgttcaactctcagagtttaacttttcttttcattcagcggtttggaaacactctgtttgtaaagtctgcacgtggatattttgatcacttagaggccttcgttggaaacgggattttttcatgtaaggctagacagaagaattcccagtaacttccttgtgttgtgtgcattcaactcacagagttgaacgttcccttagacagagcagatttgaaacactctatttgtgcaatttgcaagtgtagatttcaagcgctttaatgtcaatggcagaaaaggaaatatcttcgtttcaaaactagacagaatgattctcagaaacccctttgtgatgtgtgcgttcaactcacagagtttaacctttctgttcatagagcagttaggaaacactctgtttgtaaagtctgtaagtggatattctgacatgcttgtggccttcgttggaaacgggatttcttcatattctgctagacagaagaattctcagtaacttccttgtgttgtgtgtattcaactcacagaattgaacgatcctttacacagagcagacttgaaacactctttttgtggaatttgcaagcggagatttcagccgctttggggtcaatggtagaaaaggaaatatcttcgtataaagactagacagaatgattctcagaaactcctttgtgatgtgtgcgttcaactcacagagtttaacctttcttttcatagagcagttaggaaacactctgtttgtaaagtctgcatgtggatattcagacctctttgaggccttcgttggaaacgggtttttttcatataaggctagacagaagaattctcagtaacttccttgtgttgtgtgtattcaactgacatagttgaactttcatttagagagagcagatttgaaactctgtttttgtggaatttgcaagtggagatttcaagcgctttggggccaaaggcagaaaaggaaatatcttcgtataaaaactagacagaatcattctcagaaactgctctgcgatgtgtgccgttcaactctcagagtttaacttttcttctcattcagcagtttggaaacactctgtttgtaaagtctgcacgtggataatttgaccacttagaggccttcgttggaaacgggtttttttcatgtaaggctagacagaagaattcccagtaacttcccttgtgttgtgtgcattcaactcacagagttgaacgttcccttagacagagcagatttgaaacactctatttgtgcaatttgcaagtgtagttttcaagctctttaaggtcaacggcagaaaaggaaatatcttcgtttcaaaactagacagaatgattctcagaaactcctttgtgatgtgtgagttcaactcacagagtttatcctttcttttcatagagcagttaggaaacactctgtttgtaaagtctgcaagtggatattcagacctctttgaggccttcgttggaaacgggatttcttcatattctgctagacagaagaattctcagtaacttccttgtgttgtgtgcattgaactcacagagttgaacgatcctttacacagggcagacttgaaacactctttttgtggagtttgcaagcggagatttcagcctctttgaggttaatggtagaaaatgaaatatcttcgtatagaaactagacagaatgattctcagaaactcctttgtgatgtgtgcgttcaactcacagagtttaacctttcttttcacagagcagttaggaaacactctgtttgtaaagtttgcaagtggatattctgacatccttgaggccttcgttggaaacgggatttcttcatattatgctacacagaagaattctcaataacttccttgtgttgtgtgtattccaatcacagagttgaacgatcctttacacagagcagacttgaaacactgtttttgtggaatttgcaagtggagatttcagccgctttgaggtcaatggttgaaaaggaaatatcttccaatagaaatttgacagaatgattctcagaaactcctttgtgatgtgtgcgttcaactcacagagtttaacctttcttttcatagagcagttaggaaacactctgtttgtaaagtctgcaagtggatattcagacatctttgaggccttcgttggaaacgggatttcttcatattatgttagacagaagaattctcagtaactttcttgtgttgtgtgtattcaactgacagagttgaactttcatttagagagagcagatttgaaacactgtttttgtggaatttgcaagtggagatttcaagcgctttggggccaaaggcagaaaaggaaatatcttcgtataaaaactggacagaatcattctcagaaactgctgcgtgatgtgtgcgttcaactctcagagtttaacttttcttttcattcagcggtttggaaacactctgtttgtaaagtctgcacgtggatattatgaccacttagaggccttcgttggaaacgggttttcttcatgtaaggctagacagaagaattcccagtaacttccttgtgttgtgtgcattcaactcacagagttgaacgttcccttagacagagcagatttgaaacactccatttgtgcaatttgcaagtgtagatttcaagcgctttaaggtcaatggcagaaaaggaaatatcttcgtttcaaaactagacagaatcattcccacaaactgcgttgtgatgtgttcgttcaactcacagagtttaacctttcttttcatagagcagttaggaaacactctgttggtaaattctgtaagtggatattctgacatcttgtggccttcagtggaaacgggattttttcatattctgctagacagaataattctcagtaacttccttgtgttgtgtgtattcaactcccagagttgaacgatcctttacacagagcagacttgaaacattctttttgtggaatttgcaagtggagatttcagccgctttgaggtcaatggtagaataggaaatatcttcctatagaaactagacagaatgattctgagaaactcctttgtgatgtgtgcgttcaactcacagagtttaacctttcttttcatagagcagttaggaaacactctgtttgtaaagtgtgcaagtggatattcagacctccttgaggccttcgttggaaacgggatttcttcatattatgctagacagaagaattcccagtaacttccttgtgttgtgtgtgttcaactcacagagttgaactttcatttacacagagcagatttgaaacactctttttgtggaatttgcaaatggagatttcaagcgctttcaggccaaaggcagaaaaggaaatatcttcgtataaaaactagacagaatcattctcagaaactgctgcgtgatgtgtgcgttcaactctcagagtttaacttttctttacattcagcggtttggaaacactctgtttgtaaagtctgcacgtggaaattttgaccacttagaggccttcgttggaaacgggtttttttcatgtaaggctagacagaagaattcccagtaacttccttgcgttgtgtacattccactcacagagttgaacgttcccttagacagagcagatttgaaacactctttttgtgcaattggcaagtggtgatttcagccgctttgaggtcaatggtagaaaaggaaatatcttcgtataaaaactagacagaatcattcccacaaactgcgttgtgatgtgttcgttcaactcacagagtttaacctttctgttcatagagcagttaggaaacactctgattgtaaagtctgtaagtggatattctgacatcttgtggccttcgttggaaacgggatttcttcatattctgctagacagaagaattctcagtaacttccttgtgttgtgtgcattcaactcacagagttgaatgatcctttacacagagcacattagaaacactctttttgtggaatttgcaagtggagatttcagccgctttgaggtcaatggcagaaaaggaaatatcttcgtataaaaactagacagaatgattctcagaaactcctttgtgatgtgtgcgttcaactcacagagtttaacctttcttttcatagagcagttaggaaacactctgtttgtaaagtctgcaagtggatattcagacctctttgaggctcttcgttggaaacgggtttttttcatataaggctagacagagcaattctcagtaacttccttgtgttgtgtgtattcaactgacagagttgaactttcatttagagagagcagatttgaaacactgtttttgtggaatttgcaagtggagatttcaagcgctttggggccaaaggcagaaaaggaaatatcttcgtataaaaactagacagaatcattctcagaaactgctgcgtgatgtgtgcgttcaactctcagagtttaacttttcttttcattcagcggtttggaaacactctgtttgtaaagtctgcacgtggatattttgaccacttagaggcctttgttggaaacgggtttttttcatgtaaggctagacagaagaattcccagtaacttccttgtgttgtgtgcattcaactcacagagttgaacgttcccttagacagagcagatttgaaacactctatttgtgcaatttgcaagtgtagatttcaagcgctttaaggtcaatggcagaaaaggaaatttcttcgtttcaaaactagacagaatgattctcagaaaatcttttgtgatgtgtgcgttcaactcacagagtttaacttttcttctcatagagcagttaggaaacattctgtttgtaaagtgtgcaagtggatattcagacttctttgaggccttcgttggaaacgggatttcttcatattatgctagacagaataattctcagtaacttccttgtgttgtgtgtattcaactcacagagttgaaggatcctttacagagagcaggcttgaaacactctttttgtggaatttgcaagtggagatttcagccgctttgaggtcaatggtagaataggaaataccttcttatagaaactagacagaatgattctcagaaactcctttgtgatgtgtgcgttcaactcacagagtttaacctttctgttcatagagcagttaggaaacactctgtttgtaaagtctgcaagtggatattcagacctccttgattccttcggtggaaacgggatttcttcatattatgctagacagaagaattctcagtaacttccttgtgttgtgtgtattcaactcacagagttgaacgatcctttacagagagcagacttgaaacactctttttgtggaatttgtaagtggagatttcagccgctttgaggtcaatggttgaaaaggaaactatcttcgtataaagactagacagaatgattctcagaaactcctttgtgatgtgtgcgttcaactcacagagtttaacctttcttttcatagagcagttaggaaacactctgtttgtaaagtctgcaagtggatattcagacctctttgaggccttcgttggaaacgggtttttttcatataaggctcgacagaagaattctcagtaacttccttgtgttgtgtgtattcaactgaaagagttgaactttcatttagagagagcagatttgaaacactgtttttgtggaagttgcaagtggagatttcaagcgctttggggccaaaggcagaaaaggaaatatcttcgtataaaaactagacagaatcattctcagaaactgctgcgtgatgtgtgcgttcaactctcagagtttaacttttcttttcattcagccgtttggaaacactctgtttgtaaagtctgcacgtggatattttgaccacttaggggccttcgttggaaacgggttttttgcatgtaaggctagacagaagaattcccagtaacttccttgtgttgtgtgcattcaactcacagagttgaacgttcccttagacagagcagatttgaaacactctatttgtgcaatttgcaagtgtagatttcaagcgctttaaggtcaacggcagaaaaaggaaatatcttcgtttcaaaactagacagaatcattcccacaaactgcgttgtgatgtgttcgttcaactcacagagtttaacctttcttttcatagagcagttaggaaacagtctgtttgtcaattctgtaagtggatattctgacatcttgtggccttcgttggaaacgggatttcttcacattctcctagacagaagaattctcagtaacttccttgtgttgtgtgtattcaactcacagagttgaacgatcctttacacagagcagacttgtaacactctttttgtggaatttgcaagtggagatttcagccgctttgaagtcaaatgtagaaaaggaaatatcttcctataaaaactagacagaatgattctcagaaacttctttgtgatgtgtgtgttcaactcacagagtttaacctttcttttcatagagcagttaggaaacactctgtttgtaaactctgcaagtggatattcagacctctttgaggacttcgttggaaacgggtttttttcatataaggctagacagaagaattcccagtaactttccttgtgttgtgtgtgttcaactcacagagttgaactttcagttacacagagcagatttgaaacactctttttgtggactttgcaaatggagatttcaagcgctttgaggccaaaggcagaaatggaaatatgcttcgtataaaaactagacagaatcattctcagaaactgctctgcgatgtgtgcgttcaagtctcagagtttaacttttcttttcattcagcagtttggaaacactctctttgtaaagtctgcaggtggatattttgaccacttagaggccttcgttggaaacgggtttttttcctgtaaggctagacagaagaattcccagtaacttccttgtgttgtgtgcattcaactcacagagttgaacgttcccttaggcagagcagataggaaacactctatttgtgcaatttgcaagtgtagatttcaagcgctttaaggtcaacggcagaaaaggaaatatcttcgtttcaaaactagacagaagaattctcagtaacttccttgtgttgtgtgtattcaactcacagagatgaacgatcctttacacagagcagacttgaaacactctttttgtggaatttgcaactggagatttcagccgctttgaggtcaatagtagaaaaggaaataacttcgtagaaaaactagacagaatgattctcagaaactcctttgtcatgtgtgtgttcaactcacagagtttaacctttcttttcatagagcagttagtaaacactctgtttataaagtctgcaagtggatattcagacccctttgaggccttcgttggaaacgggatttcttcatattatgctagacagaagaattcccagtaacttccttgtgttgtgtgtgttcaactcacacagttgaactttcgtttacacagagcagatttgaaacactctttttgtggaatttgcaaatggagatttcaagcgctttgaggccaaaggcagaaaaggaaatatcttcgtataaaaactagacagaatcattctcaaaaactgctctgcgatgtgtgcgttcaactctcagagtttaacttttcttttcattcagcagtttggaaacactctgtttgtaaagtctgcacgtggatattttgaccacttagaggccttcgttggaaacgggtttttttcctgtaaggctagacagaagaattcccagtaacttccttgtgttgtgtacattcaactcacagagttgaacgttcccttagacagagcagatttgaaacactctttttgtgcaattggctaatggagatttcaagcgctttaaggtcaatggcagaaaaggaaatatcttcgtttcaaaactagacagaatcattcccacaaactgcgttgtgatgtgttcgttcaactcacagagttgaacctttcttttcatagagcagttaggaaacagtctgtttgtcaattctgtaagtggatattctgacatcttgtggccttcgttggaaacgggatttcttcatattctgctagacagaagaattctcagaatcttccttgtgttgtgtgtattcaactcacagagttgaacgatcctttacacagagcagacttgaaacactctttttgtggaatttgcaagtggagatttcagccgctttgaagtccatggtagaaaaggaaatatcttcgtataaaaactagacagaatgattctcagaaactcctttgtgatgtgtgcgttcaactcacagagtttaacctttctgttcatagaggtgttaggaaacactctgtttgtaaagtctgcaagtggatattcagacctccttgaggccttcgttggaaacgggatttcttcatattctgctagacagaagaattctcagtaacttccttgtgttgtgtgtattcaactgacagagttgaactttcatttagagagagcagatttgaaacactgtttttgtggagtttgcaagtggagatttcaagcgctttggggccaaaggcagaaaaggaaatatcttcgtataaaaactagacagaatcattctcagaaactgctgcgtgatgtgtgcgttcaactctcagagtttaacttttcttttcattcagcggtttggaaacactctgtttgtaagtctgcacgtggatattttgaccacttagaggctttcgttggaaacgcgtttttttcatgtaaggctagacagaagaattcccagtaacttccttgtgttgtgtgcattcaactcacagtgttgaacgttcccttagacagagcagatttgaaacactctatttgtgaatttgcaagtgtagatttcaagcgctttaaggtcaatggcagaaaaggaaatatcttcgtttcaaaactagacagaatcattcccacaaactgcgttgtgatgtgttcgttcaactcacagagtttaacttttctgttcatagagcagttaggaaacactctgtttgtaaagtctgaaagtggatattctgacatcttgtggccttcgtttgaaacgggatttcttcatattctgctagacagaagaattctcagtaacttccttgtgttgtgtgtattcaactcacagagttgaacgatcctttacacagaacagacttgtaacactctttttgtggaatttgcaagtggagatttcagccactttgaagtcaaaggtagaaaaggaaataacttcctataaaaactagacagaatgattctcagaaactcctttgtgatgtgtgcgttcacctcacagagtttaacttttcttttcatagagcagttaggaaacactctgtttgtaaagtctgcaagtgtatattcagacctctttgaggccttcgttggaaacgggatttcttcatattatgctagacagaagaattcccagtaacttccttgtgttgtgtgtgttcaactcacagagttgaactttcatttacacagagcagatttgaaacactctttttgtggaatttgcaagtggagatttcaagcgctttgaggccaaaggcagaaaaggaaatatcttcgtttgaaaactacacagaatcattctcagaaactgctgcgtgatgtatgcgttcaactctcagagtttaacttttcttttcattcagcggtttggaaacactctgtttgtaaagtctgcacgtggatattttgaccacttagaggccttcgttggaaacgggtttttttcatgtaaggctagacagaagaattcccagtaacttccttgtgttgtgtgcattccactcacagagttgaacgttcccttagacagagcagatttgaaacactctatttgtgcaatttgcaagtgtagatttcaagcgctttaaggtcaatggcagaaaaggaaatatcttcgtttcaaaactagacagaatcattcccacaaactgcgttgtgatgtgttcggttcaactcacagagtttaacctttctgttcatagagcagttaggaaacactctgtttgtaaagtctgtaagtggatattctgacatcttgtggccttcgttggaaacgggatttcttcatattatgctagaaagaagaattctcagaaacttccttgtgttgtgtgttttcaactcacagagttgaacgatgctttacacagagtagacttgaaacactctttttgtgtaatttgcaagtggagatttcagccgcattgaggtcaatggtagaaaaggaaatatcttcgtttaaaaactagacagaataattctcagaaacttcattgtgatgtgtgcgttcaactcacagagtttaacctttcttttcatagagcagttaggaaacactgtttgtaaactctgcaagtggatattcagacctctttgaggccttcgttggaaacgggatttcttcatactgtgctagacagaagaattctcagtaatttccttgtgttgtgtgtattcaactcacagagttgaacgatcctttacacagagcagacttgaaacactcttcttgcggaatttgcaagtggagatttcagccgctttgaggtcaatggtagaataggaaatatcttcctatagaaactagacagaatgattctcagaaactcctttgtgatgtgtgcgttcaactcacagagtttaacctttcttttcatagagcagttgggaaacactctgtttgtaaagtctgcaagtggatattcagacctctttgaggccttcgttggaaacgggatttcttcatattctgctagacagaagaattcccagtaacttccttgtgctgtgtgtgttcaactcacagagttgaactttcatttacacagagcagatttgaaacactctttttgtggaatttgcaagtggagatttcaagcgctttgaggccaaaggcagaaaaggaaatatcttcgtataaaaactagacagaatcatgctgagaaactgctctgcgatgtgtgcgttcaactctcagagtttaacttttcttttcattcagcagtttggaaacactctgtttgtaaagtctgcacgtgcataatttgaccgcttagaggccttcgttggaaacgggtttttttcatgtaaggctagacagaagaattcccagtaacttccttgtgtagtgtgcattcaactcacagagttgaacgttcccttagacagagcagatttgaaacactatatttgtgcaaattgcaagtgtagatttcaagtgatttaaggtcaatggcagaaaaggaaatatcttcgtttcaaaactagacagaatcattcccacaaactgcgttgtgatgtattcgttcaactcacagagtttaacctttctgttcatagagcagttaggaaacactctgtttgtaaagtctgcaagtggatattcagacctctttgaggccttcgttggaaacgggatttcttcatattatgctagacaaaagaattctcagtaacttccttgtgttgtgtgtattcaactcacagagttgaaggatcctttacacagagcagacttgaaacactctttttgtggaatttgcaagtggagatttcagccgctttgaggtcaatggtagaataggaaatatcttcctatagaaactagacagaatgattctgagaaactcctttgtgatgtgtgcgttcaactcacagagtttaacctttcttttcatagagcagttaggaaacactctgtttgtaatgtgtgcaagtggatattcagacctccttgaggccttcgttggaaacgggatttcttcatattatgctagacacaagaattctcagtaacttcattgtgttgtgtgttttcaactgacagagttgaactttcatttagagagagcagatttgtaacactgtttttgtggaatttgcaagtggagatttcaagcgctttggggccaaaggcagaaaaggaaatatcttcgtataaaaactagacagaatcattctcagaaactgctctgcgatgtgtgcgttcaactctcagaatttaacttttcttttcattcagcagtttggaaacactctgtttgtaaagtctgcacgtggataatttgaccacttagaggccttcgttggaaacgggtttttttcatgtaaggctagacagaagaattcccagtaacttccttgtgttgtgtacattcaactcacagagttgaacgtttccttagacagagcagatttgaaacactctttttgtgcaattggcaagtggagatttcaagcgctttgaggtcaatggcagaaaaggaaatatcttcgtttcaaaactagacaaaatcattcccacaaactgcgttgtgatgtgttcgttcaactcacagagtttaacctttctgttcatagagcagttaggaaaaactctgtttgtaaagtctgtaagtagatattctgacatcttgtggccttctttggaaaagggatttcttcatattctgctagacagaagaattctcagtaactttccttgtgttgtgtttattcaactcacagagttgaatgatcctttacacagagcagacttgaaacactctttttgtggaatttgcaagtggagatttcagccgctttgaggtcaatggtagaaaagtaaatatcttcctataaagactagacagaatgattctcagaaactcctttgtgatgtgtgtgttcaactcacagagtttaacctttcttttcctagagcagttagtaaacactctgtttataaagtctgcaagtggatattcagacccctttcaggccttcgttggaaacgggatttcttcatattatgctagacagaagaattcccagtaacttccttgtgttgtgtgtgttcaactcacagagttgaactttcatttacacagagcagatttgaaacactctttttgtggaatttgcaagtggagatttcaagcgctttgaggccaaagcagaaaaggaaatatcttcgtttcgaaactagacagaatcattctcagaaaatgctctgtgatgtgtacgttcaactctcagagtttaacttttgttttcattcagcagtttggaaacactctgtttgtaaagtctgcacgtggatattttgaccacttagaggccttcgttggaaacgggtttttttcatgtaagggtagacagaagaattctcagtaacttccttgtgttgtgtgtattcaactcacagagttgaacgatcctttacacagagcagacttgtaacactctttttgtggaatttgcaagtggagacttcagccgctttgaagtcaaaggtagaaaaggaaatatcttcctataaaaactagacagaatcattcccacaaactgcgttgtgatgcgttcgttcaactcacatagtttaacctttctgttcatagagcagttaggaaacactctgtttgtaaagtctgcaagtggatattcagacctccttgaggccttcgttggaaacgggatttcttcatattctgctagacagaagaattctcagtaacttccttgtgttgtgtgtattcaactcacagagttgaacgatcctttacacagagcagacttgaaacactcgatttgtggaatttgcaagtggagatttcagccgctttgaggtcaatggtagaaaaggaaatatcttcgtataaaaactagacagaacgattctcagaaactcctttgtgatgtgtgtgttcaactcacagagtttaacctttcttttcatagagcagttagtaaacactctgtttataaagtctgcaagtggatattcagacccctttgaggccttcgttggaaacgggatttcttcatattatgctagacagaagaattctcagtaacttccttgtgttgtgtgtattcaactcacagagtcgaacgatcctttacgcagagcagacttgaaacactctttttgtggaatttgcaagtggagatttcagccgctttgaggtcaatggtagaaaaggaaatatcttcgtataaagactagacagaatgattctcagaaactcctttgtgatgtgtgcgttcaactcacagagtttaacctttcttttcatagagcagttaggaaacactctgtttgtaaagtctgcaagtggatattcagacctctttgaggccttcgttggaaacgggatttcttcatattctgctagagagaagaattctcagtaacttccttgtgttgtgtgtattcaactgacagagttgaactttcatttagagagagcagatttgaaacactgtttttgtggaatttgcaaatggagatttcaagcgctttggggccaaaggcagaaaaggaaatatcttcctataaaaactagacagaatcattctcagaaactgctgcgtgatgtgtgcgttcaactctcagagtttaacttttcttttcattcaacggtttggaaacactctctttgtaaagtctgcacgtggaaattttgaccacttagaggccttcgttggaaacgggtttttttcatgtaaggctagacagaagaattcccagtaacttccttgtgttgtgtgcattcaactcacagagttgaacgttcccttagacagagcagatttgaaacactctatttctgcaatttgcaagtgtagttttcaagctctttaaggtcaacggcagaaaaggaaatatcatcgtttcaaaactagacagaatcattcccacaaactgcgttgtgatgttttcgttcaactcacagagtttaacctttcttttcatagagcagttaggaaacagtctgtttgtcaattctgtaagtggatattctgacatcttgtggccttcgttggaaacgggatttcttcatattctgctagacagaagaattctcagaatctttccttgtgttgtgtgtattcaactcacagagttgaacgatcctttacacagagcagacttgaaacactctttttgtggaatttgcaagtggagatttcagccgctttgaagtccatggtagaaaaggaaatatcttcgtataaaaactagacagaatgattctcagaaactcctttgtgatgtgtgcgttcaactcacagagtttaacctttcttttcatagagcagttaggaaaccctctgtttgtaaagtctgcaagtggatattcagacctctttgaggccttcgttggaaacgggatttcttcatattctgctagacagaagaattctcagaatcttccttgtgttgtgtgtattcaactcacagagttgaacgatcctttacacagagcagacttgaaacactctttttgtggaatttgcaagtggagatttcagccgctttgaggtccttggtagaaaaggaaatatcttcgtataaaaactagacagaatgattctcagaaactcctttgtgatgtgtgcgttcaactcacagagtttaacctttcttttcatagagcagttaggaaacactctgtttgtaaagtctgcaagtggatattcagacctctttgaggccttcgttggaaacgggtttttctcatataaggctagacagaagaattctcagtaacttccttgtgttgtgtgtattcaactgacagagttgaactttcatttagagacagcagatttgaaacactgtttttgtggaatttgcaagtggagatttcaagcgctttggggccaaaggcagaaaaagaaatatcttcgtataaaaactagacagaatcattctcagaaactgctgcgtgatgtgtgcgttcaactctcagagtttaacttttcttttcattcagcggtttggaaacactctgtttgtaaagactgcacgtggatattttgaccccttagaggccttcgttggaaacgggtttttttcatgtaaggctagacagaagaattcccagtaacttccttgtgttgtgtgcattcaactcacagagttgaacgtacccttagacagagcagatttgaaacactctatttgtgcaatttccaagtgtagatttcaagcgctttaaggtcaacggcagaaaaggaaatatcttcgtttcaaaactagacagaatcattcccacaaactgcgttgtgatgtgttcgctcaactcacagagtttaacctttctgttcatagagcagttaggaaacactctgtttgtaaagtctgtaagtggatattctgacatccttgtggccttcgttggaaacgggatttcttcatattctgctagacagaagaattctcagtaacttccttgtgttgtgtgtattcaactcacagagttgaacgatgatttacacagagcagacttgaaactctctttttgtggaatttgcaactggagatttcagccgctttgaggtcaatggtagaataggaaatatcttcctatagaaactagacagaatgattctcagaaactcctttgtgatgtgtgcgttcaactcacagagttcaacctttcttttcatagagcagttgggaaacactctgtttgtaaagtctgcaagtggatattcaaacttctttgaggccttcgttggaagcgggatttcttcatattctgctagacggaagaattcccagtaacttccttgtgttgtgtgtgttcaactcacagagttgaactttcatttaaacagagcagatttgaaacactctttttgtggaatttgcaaatggagatttcaagcgctttgaggccaaaggcagaaaaggaaatatcttcgtttcaaaactagacagaatcattctcagaaactgctctgtgatgtgtgcgttcaactctcagagtttaacttttcttttcattcagcagtttggaaacactctgtttgtaaagtctgcacgtggataatttgaccacttagaggccttcgttggaaacggttttttttcatgtaaggctagacagaagaattcccagtaacttcctggtgttgtgtacattcaactcacagagttgaacgttcccttagacagagcagatttgaaacactctttttgtgcaattggcaaatggagatttcaagcgctttaaggtcaatggcagaaaaggaaatatcttcgtttcaaaactagacagaatcattcccacaaactgcgttgtgatgtgttcgttcaactcacagagtttaacctttctgttcatagagcagttaggaaaaactctgtttgtaaagtctgtaagtggatattctgacatcttgtggccttcgttggaaacgggatttcttcatattctgctagacagaagaattctcagtaacttccttgtgttgtgtgtattcaactcacagagttgaacgatcctttacacagagcagacttgaaacactctatttgtagaatttgcaagtggagatttcagccgctttgaggtcagtagtagaaaaggaaatatcttcgtggaaaaactagacagaatgattctcagaaactcctttgtgatgtgtgcgttgaactcacagagtttaacttttcttttcatagagcagttaggaaacactatgtttgtaaagtctgcaagtggatattcagacctctttgaggccttcgttggaaacgggatttcttcacattctgctagacagaagaattctcagtaacttccttgtgttgtgtgtattcaactcacagagttgaacgatcctttacacagagcagacttgaatcactctttttgtggaatttgcaaatggagatttcagccgctttgaggtcaatagtagaaaaggaaatatcttcgtagaaaaactagacagaatcattctcagaaactgctctgcgatgtgtgcgttcaactctcagagtttaacttttcttttcattcagcagtttggaaacactctgtttttaaagtctgcacgtggatattttgaccacttagaggccttcgttggaaacgggtttttttcctgtaaggctagacagaagaattcccagtaacttccttgtgttgtgtgcattcaactcacagcagttgaacgttcccttagacagagcagatttgaaacactctatttgtgcaatttgcaagtgtagatttcaagcgctttaaggtcaatggcagaaaaggaaatattttcgtttcaaaactagacagaatcattcccacaaactgcgttgtgatgtgttcgttcaactcacagagtttaacctttctgttcatagagcagttaggaaacactctgtttgtaaactctgtaagtggatattctgacatcttgtggccttcgttggaaacgggatttcttcacattctgctagacagaagaattctcagaaacttcccttgtgttgtgtgttttcaactcacagagttgaacgatcctttacacagagcagacttgaaacactccttttgtggaatttgcaagtggagatttcagccgctttgaggtcaatggtagaataggaaatatcttcctatagaaagtagacagaatgattctcagaaacttcattgtgatgtgtgcgttcaactcacagagtttaacctttcttttcatacagcagttaggaaacactctgtttgtaaactctgcaagtcgatattcacacctctttgaggccttcgttggaaacgggatttcttcatactgtgctagacagaagaattctcagtaacttccttgtgttgtgtgtattcaactcacagagttgaacgatcctttacacagagaggacttgaaacactctttttgtggaatttgcaagtggagatttcagccgcgttgaggtcaatggtagaaaaggaaatatcttcgtataaaaactagacagaatcattctcagaaagtgctctgcgatgtgtgcgttcaactctcagagtttaactttgcttttcattcagcagtttggaaacactctgtttgtaaagtctgcacgtggataatttgaccacttagaggccttcgttggaaacgggtttttttcatgtaaggctagacagaagaattcccagtaacttccttgtgttgtgtacattcaactcacagagttgaacgttcccttagacagagcagatttgaaacactctttttgtgcaattggaaagtggagatttcaagcgctttaaggtcaatggcagaaaaggaaatatcttcgtttcaaaactagacagaatcattcccacaaactgcgttgtgatgtgttcgttcaacacacagagtttaacctttcttttcatagagcagttaggaaacagtctgtttgtcaattctgtaagtggatattctgacatcttgtggccttcgttggaaacgagatttcttcatattctgctagacagaagaattctcagtaactaccttgtgttgtgtgtattcaactcacagagttgaacgatcctttacacagagcggacttgaaacactcgttttgtggaatttgcaagtggagatttcagccgcgttgaggtcaatggtagaaaaggaaatatcttcgtataaaaactagacagaatgattctcagaaactcctttgtgatgtgtgcgttcaactcacagagttcaacctttcttttcatagagcagttaggaaacactctgtttgtaaagtctgcaagtggatattcagacttctttgagtccttcgttggaagcgggatttcttcatgttctgctagacagaagaattctcagtaacttccttgtattgtgtgtattcaactcacagagttgaacgatcctttacacagagcagacttgaaacaatctttttgtggaatttgcaagtggagatttcagccgctttgaggtcaatggtagaataggaaatatcttcctatagaaactagacagagtgattctcagaaactcctttgtgatgtctgcgttcaactcacagagtttaaccttccttttcatagagcagttaggaaacactctgtttgtaaattctgcaagtggatattcagacctccttgaggccttcgttggaaacgggatttcttcatattctgctatacagaagaattctcagaaacttccttgtgttgtgtgttttcaactcacagagttcaacgatccattacacagagtatacttgaaacactctttttgtggaattggcaagtggagatttcagccgctttgaggtcaatggtagaaaaggaaatatcttcgtataaaaactagacagaatcattctcagaaactgctctgtgatgtgtgcgttcaactctcagagtttaacttttcttttcattcagcagtttggaaacactctgtttgtaaagtctgcacgtggatattttgaccacttagaggccttcgttggaaaagggatttcttcatatgatgctagacagaagaattcccagtaacttccttgtgttgtgtgcattcaactcacagagttcaacgttcccttagacagagcagatttgaaacactctatttgtgcaatttgcaagtgtagatttcaagcgctttaaggtcaatggcagaaaaggaaatatcttcgtttcaaaactagacagaatcattcccacaaactgcgttgtgatgtgttcgttcaactcacagagtttaacctttctgttcatagagcagttaggaaacactctgtaaagtctgtaagtggatattctgacatcttgtggccttcgttggaaacgggatttcttcatattctgctagacagaagaattctcagtaacttccttgtgttgtgtgtattcaactcacagagttgaacgatcctttacacagagcagacttgtaaccctctttttgtggaatttgcaagtggagatttcagccgctttgaagtcaaaggtagaaaaggaaatatcttcctataaaaactagacagaatgattctcagaaaatcttttgtgatgtgtgcgttcaactcaaagagtttaacttttcttctcatagagcagttaggaaacactctgtttgtaaagtctgcaagtggatattcagacctctttgaggccttcgttggaaaagggatttcttcatattatgctagacagaagaattctcagtaacttccttgtgttgtgtgtgttcaacacacagagttgaactttcatttacacagagcagatttgaaacactctttttgtggaatttgcaagtggagatttcaagcgctttgaggccaaaggcagaaaaggaaatatcttcgtttcaaaactagacagaatcattctcagaaactgctgcgtgatgtgtgcgttcaactctcagagtttaacttttcttttcattcagcggtttggaaacagtctgtttgtaaagtctgcacgtggatattttgaccacttagaggccttcgttggaaacgggttttttgcatgtaaggctagacagaagaattcccagtaacttccttgtgttgtgtacattcaactcacagagttgaacattcccttagacagagcagatttgaaacactctttttgtgcaattggcaaatggagatttcaagcgctttaaggtcaatggcaggaaaggaaatatcttcgtttcaaaactagacagaatgattctcagaaactcctttgtgatgtgtgcgttcaactcacagagtttaacctttcttttcatagagcagttaggaaacactctgtttgtaaagtctgcaagtggatattcacacctctttgaggccttcgttggaaacgggatttcttcatattatgctagacagaagaattctcagtaacttccttgtgttgtctgtattcaactcacagagttgaacgatcctttacacagagcagacttgaaacactctttttgtggaatttgcaagtggagatttcagccgctttgaggtcaatggtagaataggaaatatcttcctatagaaactagacagaatgattctcagaaactcctttgtgatgtgtgcgttcaagtcacagagtttaacctttcttttcatagagcagttaggaaacactctgtttgtaaagtctgcaagtggatattcagacctccttgaggctttcgttggaaacgggatttcttcatattctgctagacagaagaattctcagtaacttccttttgttgtgtgtattcaactgacagagttgaactttcatttacacagagcagatttgaaacactctttttgtggtatttgcaagtggagatttcagccgctttgatgtcaatgatagaaaaggaaatatcttcatataaaaattagacagaatgattctcagaaacttctttgtgatgtgtgcgttcaactcacagagttttacctttcttttcatagagcagttaggaaacactctgtttgtaaagtctgcaagtggatattcagacctctttgaggccttcgttggaaacgggatttcttcatactatgctagacagaagatttcccagtaacttccttgtgttgtgtgtgttcaactcacagagttgaactttcatttacacagagcagatttgaaacactctttttgtggaatttgcaaatggagatttcaagcgctttgaggccaaaggcagaaaaggaaatgccttcgtttcaaaactagacagaatcattctcagaaactgctctgcgatgtgtgcgttcaactctcagagtttaacttttctttccattcagcagtttggaaacactctggttgtaaagtctgcacgtggataacttgaccacttagaggccttcgttggaaacgggtttttttcctgtaaggctagacagaagaattcccagtaacttccttgtgttgtgtgcattcaactcacagagatgaacgttcccttagacagagcagatttgaaacattctatttgtgcaatttgcaagtgtagatttcaagcgctttaaggtcaatggcagaaaaggaaaaatcttcgtttcaaaactagacagaatgattctcagaaaatcttttgtgatgtgtgcgttcaactcacagagtttaacttttcttctcatagagcagttaggaatcactctgtttgtaaactctgcaagtggatattcagacctctttgaggccttcgttggaaacgggatttcttcacattctgctagacagaagaattctcagtaacttccttgtgttgtgtgtattcaactcacagagttgaacaatcctttacacagagcagacttgaaacactctttttgtggaatttgcaagtggagatttcaggcgctttgaggtcaatggtagaaaaggaaacatctccgtataaagactagacagaatgattctcagaaactcctttgtgttgtgtgcgttcaactcacagagtttaacctttcttttcatagagcagttaggaaacactctgtttgtaaagtctgcaagtggatattcagacatctttgaggctttcgttggaaacgggatttcttcatattctgctagacagaagaattctcagtaacttccttgtgttgtgtgtattcaactcacagagttgaacgatcctttacatagagcagtcttgaaacgctctttttgtggaatttgcaagtggagatttcagccgctttgaggtcaatagtagaaaaggaaatatcttcgtagaaaaactagacagaatgattctcagaaactcctttgtgatgtgtgcgttcaacacacagagtttaacctttcttttcatagagcagttcggaaacactctgtttgtaaagtctgcaagtggatattcagacttctttgaggccttcgttggaaacgggatttcttcttattctgctagacagaagaattctcagtaacttccttgtgttgtgtgtattcaactcacagagttgaatgatcctttacacagagcagacttgaaactctctttttctggaatttgcaagtggagatttcagccgctttgaggtcaatggtagaaaagtaaatatcttcgtataaagactagacagaatgattctcagaaactcctttgtgatgtgtgcgttcaactcacagagtttaacttttcttttcatagagcagttaggaaacactctgtttgtaaagtctgcaagtggatattcagacctctttgaagccttcgttggaaacgggatttcttcatattatgctagacagaagaattctcagtaacttccttgtgttgtgtgtattcaactgacagagttgaactttcattttgagagagcagatttgaaacactgtttttgtggaatttgcaagtggagatttcaagcgcttttgggccaaaggcagaaaaggaaatatcttcgtataaaaactagacagaatcattctcagaaactgctgcgtgatgtgtgcgttcaactctcagagtttaacttttcttttcattcagcggtttggaaacactctgtttgtaaagtctgcaagtggatattttgaccacttagaggccttcgttggaaacgggattttttcatgtaaggctagacagaagaattcccagtaacttccttgtgttgtgtgcattcaactcacagagttgaacgttcccttagacagagcagatttgaaacactctatttgtgcaatttgcaagtgtagatttcaagcgcattaaggtcaatggcagaaaaggaaatatcttcgtttcaaaattagacagaatcattcccacaaactgcgttgtgatgtgttcgttcaactcacagagtttaacctttccgttcatagagcagttaggaaacactctgtttgtaaagtctgtaagaggatattctgacatcttgtggccttcgttggaaacgggatttcttcatattctgctagacagaagaattctcagtaacttccttctgttgtgtgtattcaactcacagagttcaacgatcctttacacagagcagacttgaaacactctttttgtggaatttgcaagtggagatttcagccgctttgaggtcaatggtagaaaaggaaatatcttcgtataaaaactagacagaatgattctcagaaacttctttgtgatgtgtgtgttcaactcacagagtttaacctttcttttcatagagcagttaggaaacactgtgtttttaaactctgcaagtggatattcagacctatttgaggccttcgttggaaacgggatttcttcatactgtgctagacagaagaattctcagtaacttccttgtgttgtgtgtattcaactcacagagttgaacgatcctttacacagagcagacttgaaacactctttttgtggaatttgcaagtggagatttcaagcgctttgaggccaaaggcagaaaaggaaatatcttcgtttaaaaactagacagaatcattctcagaaactgctctgcgatgtgtgcgttcaactctcagagtttaacttttcttttcattcagcagtttggaaacactctgtttgtaaagtctgcacgtggatattttgaccacttagaggccttcgttggaaacgggtgtttttcctgtaaggctagacagaagaattcccagtaacttccttgttttgtgtacattcaactcacagagttgaacgttcccttagatagagcagatttgaaacactctttttgtgcaattggcaagtggtgatttcaaccgctttgaggtcaatggtagaaaaggaaatatcttcgtataaaaactagacagaatgattcccacaaactgcgttgtgatgtgttcgtacaactcacagagtttaacctttctgttcatagagcagttaggaaacactctgtttgtaaagtctgtaagtggatattcagaactctttgaggtcttcgttggaaacgggatttcttcatattctgctagacagaagaattctcagtaacttccttgtgttgtgtgtattctactcacagagttgaacgatcctttacacagagcagtcttgaaacactctttttgtggaatttgcaagtggagatttcagccgctttgaggtcaatagtagaaaaggaaatatcttcgtagaaaaactagacagaatgattctcagaaactcctttgtgacgtgtgcgttcaactcacagagtttaacctttcttttcatagagcagttaggaaacactctgtttgtaaagtctgcaagtggatattcagacctccttgaggccttcgttggaaacgggatttcttcatattctgctagacagaagaattcccagtaacttctttgtgttgtgtgtgttcaactcacagagttgaactttcatttacacagagcagatttgaaacactctttttgtggaatttgcaagtggagatttcaagcgctttgaggccaaaggcagaaaaggaaatatcttcgtataaaaactagacagaatcattctcagaaactgctctgcgatgtgtgcgttcaactctcagagtttaacttttcttttcattcagcagtttggaaacactctgtttgtaaagtctgcacgtggatattttgaacacttagaggccttcgttggaaacgggtttttttcctgtaaggctagacagaagaattcccagtaacttccttgtgttgtgtgcattcaactcacagagttgaacgttcccttagacagagcagatttgaaacactctatttgttcaatttgcaagtgtagatttcaagcgctttaaggtcaatggcagaaaaggaaatatcttcgtttcaaaactagacagaatcattcccacaaacagcgttgtgatgtgttcgttcaactcacagagtttaacctttctgttcagagagcagttaggaaacactctgtttgtaaagtctgaaagtggatattcagacatcttgtggccttcgttggaaacgggatttcttcatattctgctagacagaagaattctcactaacttccttgtgttgtgtgtattcaactcacagagttgaacgatcctttacacagagcagacttgaaacactctttttgtggaatttgcaagtggagatttcagccgctttgaggtcaatagtagaaaaggaaatatcttcgtagaaaaactagacagaatgattctcagaaactcctttgtgatgtgtgtgttcaactcacagagtttaacctttcttttcatagagcagttaggaaacactctgtttgtaaagtctgcaagtggatattcagacctcgtttgaggccttcgttggaaactggatttcttcatattctgctagacagaagaattctcagtaacttccttgtgttgtgtgtattcaactgacagagttgaactttcatttagagagagctgatttgaaacactgtttttgtggaatttgcaagtggagatttcaagcgctttggggccaaaggcagaaaaggaaataccttcgtataaaaactagacagaatcattctcagaaactgctctgcgatgtgtgtgttcaactctcagagtttaacttttcttttcattcagcagtttggaaacactctgtttgtaaagtctgcacgtggatattttgaccacttagaggccttcgttggaaacgggtttttttcatgtaaggctatacagaagaattcccagtaacttccttgtgttgtgtacattcaactcacagagttgaacgttcccttagacagagcagatttgaaatactctttttgtgcaattggcaagtggagatttcaagcgctttaaggtcaatggcagaaaaggaaatatcttcgtttcaaaactagacagaatcattcccacaaactgcgttgtgatgtgttcgttcaactcacagagtttaacctttctgttcatggagcagttaggaaacactctgtttgtaaagtctgtaagtggatattctgacatcttgtggccttcgttggaaacgggatttcttcatattctgctagacggaagaattctcagtaacttccttgtgttgtgtgtattcaactcacagagttgaacgatcctttacacagagcagacttgaaacaccctttttgtggaatttgcaagtggagatttcagccgctttgaggtcaatagtagaaaaggaaatatcttcgtagaaaaactagacagaatgattctcagaaactccttagtgatgtgtgcgttcaactcacagagtttaacttttcttttcatagagcagttaggaaacactctgtttgtaaagtctgcaagtggatattcagacctctttgaggccttcgttggaaacgggatttcttcatattctgctagacagaagaattctcagtaacttccttgtgttgtgtgtattcaactcacagagttgaacgatcctttacacagagcaatcttgaaacattctttttgtggaatttgcaagtggagatttcagccgctttgaggtcaatggtagaataggaaatatcttcctatagaaactagacagaatcattctcagaaactgctctgcgatgtgtgcgttcaactctcagagtttaacttttcttttcattcagcagtttggaaacactctgtttgtaaagtctgcacgtggatattttgaccacttagaggccttcgttggaaacgggttttcttcctgtaaggctagacagaagaattcccagtaacttccttgtgttgtgtacattcaactcacagagttgaacgttcccttagacagagcagatttgaaacactctttttgtgcaattggcaagtggtgatttcagctgctttggggtcaatggtagaaaagggaatatcttcgtataaaaactagacagaatgattctcagaaactcctttgtgatgtgtgcgttcaactcacagagtttaacctttcttttcatagagcagttaggaaacactctgtttgtaaagtctgcaagtggatattcagacctctttgaggccttcgttggaaacgggatttcttcatattctactagacagaagaattctcagtaacttccttgtgttgtgtgtattcaactcacagagttgaacgatcctttacacagagcaaacttgaaacactcttcttgtggaatttgcaagtggagatttcagccgctttgaggtcaattgtagaataggaaatatcttcctatagaaactagacagaatgattctcagaaactcccttgtgatgtgtgcgttcaactcacagagttttagctttcttttcatagagcagttaggaaacactctgtttgtaatgtctgcaagtggatattcagacctctttgaggccttcattggaaacgggatttcttcatattatgctagacacaagaattctcagtaacttgccttgtgttgtgtgtattcaactcacagagttgaacgatcctttacacagagcagacttgaaacactctttttgtggaatttgcaagtggagatttcagccgctttgaggtcaatggtagaataggaaatatcttcctattgaaactagacagaatgattctcagaaacgcctttgtgatgtgtgtgttcaactcacagagtttaacctttcttttcatagagcagttaggaaacactctgttggtaaagtctgcaagtggatattcagacctctttgaggccttcgttggaaacgggatttcttcatactgtgctagacagaagaattctcagtaacttccttgtgttgtgtgtattcaactcacagagttgaacgatcctttacacagagcggaattgaaacactctttttgtgtaatttgcaagtggagatttcagccgcgttgaggtcaatggtagaaaaggaaatctcttcgtataaaaactagacagaatcactctcagaaactgctctgcgatgtgtgcgttcaactctcagagtttaacttttcttttcattcagcagtttggaaacactctgtttgtaaagtctgcacgtggatattttgacctctcagaggtcttcgttggaaacgggtttttttcctgtaaggctagacagaagaattcccagtaacttccttgtgttgtgtacattcaactcacagagttgaacgttcccttagacagagcagatttgaaacactctttttgtgcaattggcaaatggagatttcaagcgctttaaggtcaatggcaggaaaggaaatatcttcgtttcaaaactagacagaatgattctcataaactcctttgtgatgtgtgcattcaactcacggagtttcacctttcttttcatagagcagttaggaaacactctgtttgtaaagtctgtaagtggatattctgacatcttgtggccttcgttggaaacgggatttcttcatattctgctagacagaagaattctcagtaacttccttgtgttgtgtgtattcaactcacagagttgaacgatcctttacacagagcatacttgaaacactcttcttgtggaatttgcaaatggagatttcagccgctttgaggtccatggtagaataggaaatatcttcctatagaaactagacagaatgattctcagaaactcctttgtgatgtctgcgttcaactcacagagtttaacctttcttttcatagagcagttaggaaacactctgtttgtaaagtctggaagtggatattcagacctccttgaggccttcgttggaaacgggatttcttcatattatgctagatagaagaattctcagtaacttccttgtgttgtgtgtattcaactgacagagttgaactttcatttagagagagcagatttgaaacactgtttttgtggaatttgcaagtggagatttcaagcgctttggggccaaaggcagaaaaagaaatatcttcgtataaaaactagacagaatcattctcagaaactgctctgtgatgtgtgcgttcaactctcagagtttaacttttcttttcattcagcagtttggaaacaatctgtttgtaaagtctgcacgtggatattttgaccacttagaggccttcgttgaaaacgggtttctttcatgtaaggggagacagaagaattcccagtaacttccttgtgttgtgtgcattcaactcacagagttgaacgttcccttagacagagcagatttgaaacactctatttgtgcattttgcaagtgtagatttcaagcgctttaaggtcaatggcagaaaaggaaatatcttcgtttcaaaactagacagaatcattcccacaaactgcgttgtgatgtgttcgttcaactcacagagtttaacctttcttttcatagagcagttaggaaaaattctgtttgtaaattctgtaagtggatattctgtaatcttgtggccttcgttggaaacgggctttcttcatattctgctagacagaagaattctcagtaacttccttgtgttgtgtgtattcaactcacagagttgaacgatcctttacacagagcagacttgaaacactctttttgtggaatttgcaagtggagatttcagccgcgttgaggtcaatggtataaaaggaaatatcttcgtataaaaactagacagaatgattctcagaaactcctttgtgatgtgtgcgttcaactcacagagtttaacctttcttttcatagagcagttaggcaacactctgtttgtaaactctgcaagtggatattcagacctctttgaggccttcgatggaaacgggatttcttcatactatgctggagagaagaattctcagtaacttccttgtgttgtgtgtattcaactcacagagttgaacgatcctttacacagagcagacttgaaacactctttttgtggaatttgcaagtggagatttcagccgctttgaggtcaatggaagaaaaggaaatatcttcgtataaaaactagacagaatcattctcagaaactgctctgcgatgtgtgcgttcaactctcagagtttaacttttcttttcattcagcagtgtggaaacactctgtttgtaaagtctgcacgtggatattttgaccacttagaggccttcgttggaaaagggtttttttcctgtaaggctagacagaagaattcccagtaacttcccttgtgttgtgtacattcaactcacagagttgaacgttcccttagacagagcagatttgaaacactctttttgtgcaattggcaagtggagattacaagcgctttaaggtcaatggcagaaaaggaaatatcttcgtttcaaaactagacagaatcattcccacaaactgcgttgtgatgtgttcgttcaactcacagagtttaacctttctattcatagagcagttaggaaacactctgtttgtaaagtctgtaagtggatattctgacatcttgtggcatttgttggaaacgggatttcttcatattctgctagacagaataattctcagtaacttccttgtgttgcgtgtattcaactcacagagttgaacgatcctttacagagagcagacttgaaacactctttttgtggaatttgcaagtggagatttcagccgctttgaggtcaatgatagaataggaaatatcttcctatagaaactagacagaatgattctcagaaactcctttgtgttgtgagcgttcaactcacagagtttaacctttcttttcatagagcagttaggaaacactctgtttataaagtctgcaagtggatattcagacccctttgaggccttcgttggaaacgggatttcttcatattatgctagacagaagaattctcagtaacttccttgtgttgtgtgtattcaactgacagagttgaactttcatgtagagagagcagatttgaaacactgtttttgtggaatttgcaagtggagatttcaagcgctttggggccaaaggcagaaaaggaaatatcttcgtataaaactagacagaatcattctcagaaactgctctgtgatgtgtgcgttcaactctcagagtttaacttttcttttcattcagcagtttggaaacactctgtttgtaaagtctgcacgtggataatttgaccacttagaggccttcgttggaaacgggtttttttcatgtaaggctagacagaagaattcccagtaacttccttgtgttgtgtgcattcaactcacagagttgaacgttcccttagacagagcagatttgaaacactctatttgtgcaatttccaagtgtagttttcaagctctttgaggtcaacggcagaaaaggaaatatcttcgtttcaaaactagacagaatcattcccacaaactgcgttgtgatgtgttcgttcaactcacagagattaacctttcttttcatagagcagttaggaaacactctgtttgtaaattctgtaagtggatattctgacatcttgtggcctttgttggaaacgggatttcttcatattctgctagacacaagaattctcagtaacttccttgtgttgtgtgtattcaactcacagagttgaacgatcctttacagagggcagacttgaaacactctttttgtggaatttgcaagtggagatttcagccgttttgaggtcaatggtagaaaaggaaatatcttcgtataaagactagacagaatgattctcagaaactcctttgtgatgtgtgcgttcaactcacagagtttaacttttcttttcatagagcagttaggaaacactctgtttgtaaagtctgcaagtggatattcagacctctttgaggccttcgatagaaacgggatttcttcatattctgctagacagaggaattctcagtaacttctttgtgttgtgtgtattcaactcacagagttgaacgatcctttacacagagcagacttgaaacactctttttgtggaatttgcaattggagatttcagccgctttgagttcaagggtagaataggaaatatcttcctatagaaactagacagaatgattctcagaaactcctttgtgatgtgtgcgttcaactcacagagttcaacctttcttttcatagagcagttgggaaacactctgtttgtaaagtctgcaagtggatattcagacttctttgagaccttcgttggaagcgggatttcttcatattctgctagacagaataattctcagtaacttccttgtgttgtgtgtattcaactcacagagttgaacgatcctttacacagagcagacttgaaacattctttctgtggaatttgcaagtggagatttcagccgctttgaggtcaatggtagaataggaaatattttcctatagaaactagacagaatgattctcagaaactcctttgtgatgtgtgcgttcaactcacagagtttaacttttcttttcatagagcagttaggaaacactctgtttgtaaagtctgcaagtggatattcagacctctttgaggccttcgttggaaacgggatttcctcatattatgctagacagaagaattctcagtaacttccttgtgttgtgtgtattcaactgacagagttgaactttcatttagagagagcagatttgaaacactgtttttgtggaatttgcaagtggagatttcatgcgctttggggccaaaggcagaaaaggaaatatcttcgtataaaaactagacagaatcattctcagaaagtgctctgcgatgtgtgcgttcaactctcagagtttaactttgcttttcattcagcagtttggaaacactctgtttgtaaagtctgcacgtggataatttgaccacttagaggccttcgttggaaacgggtttttttcatgtaaggctagacagaagaattcccagtaacttccttgtgttgtgtacattcaactcacagagttgaacgttcccttagacagagcagatttgaaacactctttttgtgcaattggcaaatggagatttcaagcgctttaaggtcaatggcagaaaaggaaatatattcgtttcaaaactagacagaatcattcccacaaactgcgttgtgatgtgttcgttcaactcacagagtttaacgtttccgttcatagagcagttaggaaacacactgtttgtaaagtctgtaagtggatattctgacatcttgtggccttcgttggaaacgggatttcttcatattctgctagacagaagaattctcagtaacttccttgtgttgtgtgtattcaactcacagagttgaacgatcctttacacagagcagacttgaaacactctttctgtggaatttgcaagtggagatttcagccgctttgaggtcaatagtagaaaaggaaatgtcttcgtagaaaaactagacagagtgattctcagaaactcctttgtgatgtctgcgtttaactcacagagtttaacctttcttttcatagagcagttaggaaacactctgtttgtaaagtctgcaagtggatattcagacctccttgaggccttcgttggaaacgggatttctccatattatgctggacagaagaattctcagtaactttcttgtgttgtgtgtattcaactgacagagttgaactttcatttagagagaccagatttgaaacactgtttttgtggaatttgcaagtggagatttcaagcgctttggggccaaaggcagaaaaggaaatatcttcgtataaaaactagacagaatcattctcagaaactgctgcgtgatgtgtgcgttcacctctcagagtttaacttttcttttcattcagcggtttggaaacactctgtttgtaaagtctgcacgtggaaattttgaccacttagaggccttcgttggaaacgggtttttttcatgtaaggctagacagaagcaattcccaggaacttccttgtgttgtgtacattcaactcacagcagttgaacgttcccttagacagagcagatttgaaacactctttttgtgcaattggcaagtggtgatttcagccgctttgaggtcaatggtagaaaaggaaatatcttcgtataaaaactagacagaatcattcccacaaactgcgttgtgatgtgttcgttcaactcacagagtttaacctttctgttcatagagcagttaggaaacactctgtttgtaaagtctgccagtggatattcagacctccttgaggccttcgttggaaacgggatttcttcatattctgctagacagaagaattctcagaatcttccttgtgttgtgtgtattcaactcacacagttgaacgatggtttacacagagcagatttgaaacactctttttgtggaatttgcaagtggagatttcagccgctttgaggtcaatggtagaaaaggaaatatcttcgtataacaactagacagaatgattctcataaactcctttgggatgtgtgcgttcaactcacagagtttaacctttcttttcatagagcagttaggaaacactctgtttgtaaagtctgcaagtggatattcagacctctttgaggccttcgttggaaacgggatttcttcatattctgctagacagaagaattcccagtaacttccatgtgttgtgtgtgttcaactcacagagttgaactttcatttacacagagcagatttgaaacactctttttgtggaatttgcaaatggagatttcaagcgctttgaggccagaggcagaaaaggaaatatcttcgtataaaaactagacagaatcactctcagaaactgctctgtgatgtgtgcgttcaactctcagagtttaacttttcttttcattcagcagtttggaaacactctgtttgtaaagtctgcacgtggatattttgaccacttagaggccttctttggaaacgggtttttttcatgtaaggatagacagaagaattcccagtaacttccttgtgttgtgtgcattcaactcacagagatgaacgttcccttagacagagcagatttgaaacactctatttgtgcaatttgcaagtgtagatttcaagggctttaaggtcgatggcagaaaaggaaatatcttcgtttcaaaactagacagaatgattctcagaaactcctttgtgatgtgtgcgttcaactcacagagtttaacctttcttttcatagagcagttaggaaacactctgtttgtaaagtctgcaagtggatattcagacatctttgaggccttctttggaaacgggatttcttcatgttctgctagacagaagaattctcagaaacttccttgtgttgtgtgttttcaactcacagagttgaacgatgctttacacagagtagacttgaaacactctttttgtgtaatttgcaagtggagatttcagccgctttgagagtcaatggtagaaaaggaaatatcttcgtataaaaactaggcagaatgattctaagaaacttctttgtgatgtgtgcgttcaactcacagagtttaacctttcttttcatagagcagttaggaaacactctgtttgtaaactctgcaagtggatattcagacctctttgaggccttcgttggaaacgggatttctccatactgtgcgagacagaagaattctcggtaacttccttgtgttgtgtgtattcaactgacagagttgaaatttcatttagagagagcagatttgaaacactgtttttgtggaatatgcaagtggagatttcaagcgctttggggccaagggcagaaaaggaaatatcttcgtataaaaactagacagaatcattctcagaaactgctgcgtgatgtgtgcgttcaactctcagagtttaacttttcttttcattcagcggtttggaaacactctgtttgtaaagtctgcacgtggatattttgaccacttagaggccttcgttggaaacgggttttttttcatgtaaggctagacagaagaattcccagtaacttccttgtgttgtgtacattcaactcacagagttgaacgttcccttagacagagcagatttgaaacactctttttgtgcaattggcaagtggagatttcaagcgctttgaggtcaatggcagaaaaggaaatatcttcgtttcaaaactagacagaatcattcccacaaactgcattgtgatgtgttcgttcaactcacagagtttaacctttcttttcatagagcagttaggaaacagtctgtttgtaaattctgtaagtggatattctgacatcttgtggccttcgttggaaacgggatttcttcatattctgctagacagaagaattctcagtaacttccttgtgttgtgtgtattcaactcacggagttgaacgatcctttacacagagcagacttgaaacactctttttgtggaatttgcaagtggagatttcagccgctttgaggtctatagtagaaaaggaaatatcttcatagaaaaactagacagaatgattctcagaaactcctttgtgatctgtgcgttcaactcacagagtttaacctttcttttcatagagcagttaggaaacactctgcttgtaaagtctgcaagtggatattcagccctctttgaggccttcgttggaaacgggtttttttcatataaggctagacagaagaattctcagtaacttccttgtgttgtgtgtattcaactcacagagttgaacgatcctttacacatagcagacttgaaacactctttttgtggaatttgcaagtggagatttcagccgctatggggtcaatggtagaataggaaatatcttcctatagaaactagacagaatgattctcagaaactcctttgtgatgtgtgcgttcaactcacagaatttaacatttcctttcatagagcagttaggaaacactctgtttgtaaagtctgcaagtggatattcagacctctttgaggccttcgttggaaacgggatttcttcatattctgctagacagaagaattcccagtaacttccttgtgttgtgtgtgttcaactcacagagttgaactttcatttacacagagcagatttgaaacactctttttgtggaatttgcaagtggagatttcatgcgctttgaggccaaaggcagaaaaggaaatatcttcgtataaaaactagacagaatcattctcagaaactgctctgcgatgtgtgcgttcaactctcacagtttaacttttcttttcattcagcagtttggaaacactctgtttgtaaagtctgcacgtggataatttgaccacttagaggccttcgttggaaacgggtttttttcatgtaaggctagacagaagaattcccagtaacttccttgtgttgtgtgcattcaactcacagagttcaacgttcccttagacagagcagatttgaaacactctatttgtgcaatttgcaagtgtagatttcaagcgctttaaggtcaacggcagaaaaggaaatatcttcgtttcaaaactagacagaatcattcccacaaactgcgttgtgatgtgttagttcaactcacagagtttaacctttcttttcatagagcagttaggaaacagtctgtttgtcaattctgtaagtggatattctgacatcttgtggccttcgttggaaacgggatttcttcatattctgctagacagaagaattctcagtaacttccttgtgttgtgtgtattcaactcacagagttgaacgatcctttacacagagcagacttgaaacactctttttgtggatttgcaagtggagatttcagccgctttgaggtcaatggtagaatagtaaatatcttcctgtagaaacaagagagaatgattctcagaaactcctttgtgatgtgtgcgttcaactcacagagtttaacctttcttttcatagagcagttaggaaacactctgtttgtaaagtctgcaagtggatattcagacctctttgaggccttcgttggaaacgggaattcttcatattatgctagacagaagaattcccagtaacttccttgtgttgtgtgtgttcaactcacagagttgaactttcatgtacacagagcagatttgaaacactctttttgtggaatttgcaagtggagatttcaagcgctttgaggccaaaggcagaaaaggaaatatcttcgtataaaaactagacagaatcattctcagaaactgctctgcgatgtgtgcgttcaactctaagagtttaacttttcttttcattcagcagtttggaaacactctgtttgtaaagtctgtacgtggataatttgaccacttagaggccttcgttggaaaagggtttttttcatgtaaggatagacagaagaattcccagtaacttccttgtgttgtgtacattcaactcacagagttgaacgttcccttagacagagcagatttgaaacactctttttgtgtaattggcaagtggagatttcaagcgctttaaggtcaatggcagaaaaggaaatatcttcgtttcaaaactagacagaatcattcccacaaactgcgttgtgatgtgttcgttcaactcacagagtttaacctttcttttcatagagcagttaggagacactctgtttgtaatgtctgcaagtggatattcagacctctttgaggccttcgttggaaacgggatttcttcatattatgctacacagaagaattctcagtaacttccttgtgttttgtgaattcaactcacagagttgaacgatcctatacacagagcagacttgaaacactctttttgtggaatttgcaagtggagatttcagccgctttgtggtcaatagtagaataggaaatatcttcctatagaaactagacagaatgattctcagaaactcctttgtgatgtgtgcgttcaactcacagagtttaacctttctgttcatagagcagttaggaaacactctatttgtaaagtctgcaagtggatattcagacctctttgaggccttcgttggaaacgggatttcttcatattctgctagacagaagaattctcagtaacttccttgtgttgtgtgtattcaactgacaagagttgaactttcatttggagagagcagatttgaaacactgtttttgtggaatttgcaagtggagatttcaagcgctttggggccaaaggcagaaaaggaaatatcttcgtataaaaactagacagaatcattctcagaaactgctctgcgatgtgtgcgttcaactctcagagtttaactttgcttttcattcagcagtttggaaacactctgtttgtaaagtctgcacgtggataatttgaccacttagaggccttcgttggaaacgggtttttttcatgtaaggctggacagaagaattcccagtaacttccttgtgttgtgtacattcaactcacagagttgaacgttccgttagacagagcagacttgtaacactctttttgtggaatttgcaagtggagttttcagccgcttttaagtcaatggtagaaaaggtaatatcttcctataaaaactagacagaatgattctcagaaactcctttgtgatgtgtgcgttcaactcacagagtttaacctttcttttcatagagcagttaggaaacactctgtttgttaagtctgcaagtggatattcagtcctctttgaggccttcgttggaaacgggatttcttcatattatgctagacagaagaattctcagtaacttcattgtgttgtgtgtattcaactcacagatttcaacgatcctttacacagagcagacttgaaacactctttttgtggaatttgcaagtggagatttcagccgctttgaggtcaatggtagaataggaaatatcttcctatagaaactagacagaatgattctcataaactcctttgtgatgtgtgcgttcaactcacagagtttaacctttcctttcatagagcagttaggaaacactctgtttgtaaagtctgcaagtggatattcagacctccttgaggccttcgttggaaacgggatttcttcatattctgctagacagaagaattcccagtaacttccttgtgttgtgtgtgttctactcacagagttgaactttgatttacacagagcagatttgaaacactctttttgtggaatttggaagtggagatttcaagcgctttgaggccaaaggcagaaaaggaaatatcttcgtataaaaactagacagaatcattctcagaaactgctctgcgatgtgtgcgttgaactctcagagtttaacttttcttttcattcagcagtttggaaacactctgtttgtaaagtctgtacgtggatattttgaccacttagaggccttcgttggaaacgggtttttttcctgtaaggctagacagaagaattcccagtaacttccttgtgttgtgtgcattcaactcacagagttgaacgttcccttagacagagcagatttgaaacactctatttgtgcaatttgcaagtgtagttttcaagctctttaaggtcaacggcagaaaagcaaatatcttcgtttcaaaactagacagaatgattctcagaaactcctttgtgatttgtgcgttcaactcacagagtttaacttttcttttcatagatcagttaggaaacactctgtttgtaaagtctgcaagtggatattcagacctctttgatgccttcgttggaaacgggatttcttcatattatgctagacagaataattctcagtaacttccttgtgttgtgtgtattcaactcacagagttgaacgatcctttagagagagcagacttgaaacactctttttgtggtatttgcaagtggagatttcagccgctttgtggtcaatggtagaaaaggaaactatcatcgtataaagactagacagaatgattctcagaaactcctttgtgatgtgtgtgttcaactcacagagtttaacctttcttttcatagagcagttaggaaacactctgtttgtaaagtctgcaagtggatattcagacctctttgaggccttcgttggaaacgggtttttttcatataaggctagacaaaagaattcccagtaacttccttgtgttgtgtgtgttcaactcacagagttgaactttcatttacacagagcagatttgaaacactctttttgtggaatttgcaaatggagatttcaagcgctttgaggccaaaggcagaaaaggaaatatcctcgtataaaaactagacagaatcattctcagaaactgctctgcgacgtgtgcgttcaactctcagagtttaacttttcttttcattcagcagtttggaaacactctgtttgtaaagtctgcacgtggataatttgaccacttagaggccttcgttggaaacgggtttttttcatgtaaggctagacagaagaattcctagtaacttccttgtgttgtgtacattcaactcacagagttgaacgttcccttagacagagcagatttgaaacactatttttgtgcaattggcaagtggtgatttcagccgctttgaggtcaatggtataaaaggaaatatcttcgtattaaaactagacagaatcattcccacaaactgcgttgtgatgtgttcgttcatctcacagagtttaacctttcttttcatagagcagttaggaaacagtctgtttgtaaattccgtaagtggatattctgacatcttgtggccttcgttggaaacgggatttcttcatattctgctagacagaagaattctcagaaacttccttttgttgtgtgtattcaactcacagagttgaacgatcctttacacagagcagattagaaaaactctttttgtggaatttgcaagtggagatttcagccgctttgaggtcaatggtagaaaagggaatatcttcgtataaaaactagacagaatgattctcagaaactcctttgagatgtgtgcgttcaactcacagagtttaacctttcttttcatagagcagttaggaaacactctgtttgtaaagtctgcaagtggatattcagacctctttgaggccttcgttggaaacgggttttttcatataaggctagacagaagaattctcagtaacttccttgtgttgtgtgtattcaactcacagagttgaactatcctttacacagagcagacttgaaacactctttttgtggaatttgcaagtggagatttcaagcgctttgaggccaaaagcagaaaaggaaatatcttcgtataaaaactagacagaatcattctcagaaactgctgcgtgatgtgtgcgttcaactctcagagtttaacttttcttttcattcagcggtttggaaacactctgtttgtaaagtctgcacgtggatattttgaccacttagaggccttcgttgggaaacgggtttttttcatgtaaggctagacagaagaattcccagtaacttccttgtgttgtgtgtgttcaactcacagagttgaactttcatttacacagagcagatttgaaacactctttttgtggaatttgcaaatggagatttcaagcgctttgaggccaaaggcagaaaaggaaatatcttcgtttcaaaactagacagaatcattcccacaaactgcgttgtgatgtgttcgttcaactcacagagtttaacctttctgttcatagagcagttaggaaacactctgtttctaaagtctgtaagtggatattctgacatcttgtggccttcgttggaaacgggatttcttcatattctgctagacagaagaattctcaataacttccttgtgttgtgtgtattcaactcacagagttgaacgatcctttacacagagcagacttgaaacactcttgttgtggaatttgcaagtggagatttcagccgctttgaggtcaatggtagaataggaaatatcttcctataaaaactagacagaatgattctcagaaactcctttgtgatgtgtgcgttcaactcacagagtttaacctttcttttcatagagcagttaggaaacactctgcttctaaagtatgcaagtggatatttagccctctttgaggccttcgttggaaacgggtttttttcatataaggctagacagaagaattcccagtaacttccttgtgttgtgtgtgttcaactcacagagttgaactttcatttacacagagcagatttgaaacactctttttgtggaatttgcaagtggagatatcaagcgctttgaggccaaaggcagaaaaggaaatatcttcgtataaaaactagacagaatcattctcagaaactgctctgcgatgtgtgcgttgaactctcagagtttaacttttcttttcattcagcagtttggaaacactctgtttgtaaagtctgcacgtggataatttgaccacttagaggccttcgttggaaacgggtttttttcatgtaaggctagacagaagaattcccagtaacttccttgtgttgtgtgcattcaactcacagagttgaacgttcccttagacagagcagatttgaaacactctatttgtgcaatttgcaagtgtagatttcaagcgctttaaggtcaacggcagaaaaaggaaatatcttcgtttcaaaactagacagaatcattcccacaaactgcgttgtgatgtgttcgttcaactcacagagtttaacctttcttttcatagagcagttaggaaacactctgttggtaaattctgtaagtggatattctgacatcttgtggcctccgttggaaacgggatttcttcatattctgctagacagaagaattctcagtaacttccttgtgttgtgtgtattcaactcacacagttgaacgatcctttacacagagcggacttgaaacactcgttttgtggaatttgcaagtggagatttcagccgcgttgaggtcaatggtagaaaaggaaatatcttcgtataaaaactagacagaatgattctcagaaactcctttgtgatgtgtgtgttcaactcacagagtttaacctttcttttcatagagcagttagtaaacactctgtttataaagtctgcaagtggatattcagacccctttgaggccttcgttggaaacgggatttcttcatattctcctagacagaagaattctcagtaacttccttgtgttgtgtgtattcaactgacagagttgaactttcatttggagagagcagatttgaaacactgtttttgtggaatttgcaagtggagatttcaagcgctttggggccaaaggcagaaaaggaaatatcttcgtataaacactagacagaatcattctcagaaactgctctgcgatgtgtgcgttcaactctcagagtttaacttttcttttcattcagcagtttggaaacactctgtttgtaaagtctgcacgtggataacttgaccacttagaggccttcgttggaaacgggtttttttcatgtaaggctagacagaagaattcccagtaacttccttgtgttgtgtacattcaactcacagagttgaacgttcccttagacagagcagatttgaaacactctttttctgcaattggcaaatggagatttcaagcgctttaaggtcaatggcagaaaaggaaatatcttcgtttcaaaactagacagaatgattctcagaaactcctttgtgatgtgtgcgttcaactcacagagttcaacctttcttttcatagagcagttgggatacactctgtttgtaaagtctgcaagtggatattcagacttctttgaggccttcgttggaagcgggatttcttcatattctgctagacagaagaattctcagtaacttcctcgtgttgtgtgtattcaactcacagagttgaacgaacctttacacagagcagacttgaaacactctttttgtggaatttgcaaatggagatttcagccactttgaggtcaatggttgaaaaggaaatatcttcatataaaaattagacagaatgattctcagaaactcctttgtgatgtgtgcgttcaactcacagagttcaacctttcttttcatagagcagttgggaaacactctgtttgtaaagtctgcaagtggatattcagacttctttgaggccttcgttggaagcaggatttcttcatgttctgctagacagaagaattctcagtaacttccttgtgttgtgtgtattcaactcacagagttgaacgatcctttacacagagcagtcttgaaacactctttttgtggaatttgcaagtggagatttctgacgctttgaggtcaatggtagaataggaaatatcttcctatagaaactagacagaatgattctcagaaacttctttgtgatgtgtgcgctcaactcacagagtttaacctttcttttcatagagcagttaggaaacactctgtttgtaaagtcagcaagtggatattcagacctctttgaggccttcgtaggaaacgggatttctgcatattatgctagacagaagaattcccagtaacttccttgtgttgtgtgtgttcaactcacagagttgaactttcatttacccagagcagatatgaaacactctttttgtggaatttgcaagtggagatttcaagcgctttgaggccaaaggcagaaaaggaaatatcttcgtataaaaactagacagaatcattctcagaaactgctctgtgatgtgtgcgttcatctctcagagtttaacttttcttttcattcagcagtttggaaacactctgtttgtaaagtctgcacgtggataatttgatcacttagaggccttcgttggaaacgggtttttttcatgtaaggctagacagaagaattctcagtaacttccttctgttgtgtgtattcaactcacagagttgaacgatcctttacacagagcagacttgtaacactctttttgtggaatttgcaagtggagatttcagccgctttgaagtcaaaggtagaaaaggaaatatcttcctataaaaaatagacagaatgattctcagaaacttctttgtgatgtgtgcgttcaactcacagagtttaacctttcttttcatagagcagttaggaaacactctgtttgtaaactctgcaaatggatgttcagacctctttgaggccttcgttggaaacgggatttcttcatactatgctagacagaagaattctcagtaacttccttgtgttgtgtgtattcaactcacagagttgaaccgatcctttacacagagcagacttgaaacactctttttgtggaatttgcaagtggagatttcagccgctttgaggtcaatggtagaaaaggaaatatcttcctataaaaactagacagaatgattctgagaaactcctttgtgatgtgtgcgttcaactcacagagtttaacctttcttttcatagagcagttaggaaacactctgtttgtaaagtctgcaagtggatattcagacctccttgaggccttcgttggaaacgggttttcttcatattatgctagacagaagaattcccagtaacttccttgtgttgtgtgtgttcaactcacagagttgaactttcatttacacagagcagatttgaaactctctttttgtggaatttacaaatggagatttcaagcgctttgaggccaaaggcagaaaaggaaatatcttcgtataaaaactagacagaatcattctcagaaactgctctgcgatgtgtgcgttcaactctcagagttcaacttttcttttcattcagcagtttggaaacactctgtttgtaaagtctgcacgtggataatttgactacttagaggccttcgttggaaacgggtttttttcatgtaaggctagacagaagaattcccagtaacttccttgtgttgtgtgcgttcaactcacagagttgaactttcatttacacagagcagatttgaaacactctttttgtggaatttgcaaatggagatttcaagcgctttgaggccaaaggcagaaaaggaaatgtcttcgtttcaaaactagacagaatgattctcagaaaatcttttgtgatgtgtgcgttcaactcacagagtttaacctttcttttcatagagcagttaggaaacactctgtttgtaaagtctgcaagtggatattcagacctccttgaggccttcgttggaaacgggatttcttcatattctgctagacagaagaattctcagtaacttaccttgtgttgtgtgtattcaactcacagggttgaacgatcctttacacagagcagacttgaaacactctttttgtggaatttgcaagtggcgatttcagcctctttgaggtcaatggtagaataggaaatatcttcctatagaaactagacagaatgattttcataaactccttagtgatgtgtgcgttcaactcacagagtttaacctttctgttcatagagcaattaggaaacactctgtttgtaaagtctgcaagtggatattcagacccctttgaggccttcgttggaaacgggatttcttcatattatgctagacagaaaaattctcagtaacttccttgtgttgtgtgtattcaactgacagagttgaactttcatttagagagagcagatttgaaacactgtttttgtggaatttgcaagtggagatttcaagcgctttggggccaaaggcagaaaaggaaatatcttcgtataaaaactagacagaatcattctcagaaactgctgcgtgatgtgtgcgttcaactctcagagttcaacttttcttttcattcagcggtttggaaacactctgtttgtaaagtctgcacgtggatattttgaccacttagaggccttcgttggaaacgggttttttcatgtaaggctagacagaagaattcccagtaacttccttgtgttgtgtgcattcaactcacagagttgaacgttcccttagacagagcagatttgaaacactctatttgtgcaatttgcaagtatagatttcaagcgctttaaggtcaatggcagaaaaggaaatatcttcgtttcaaaactagacagaatcattcccacaaactgcgttgtgatgtgttcgttcaactcacagagtttaacctttctgttcatagagcagttaggaaacactctgttgtaaagtctgtaagtggatattctgacatcttgtggccttcgttggaaacgggatttcttcatattctgctagacagaagaattctcagtaacttccttgtgttgtgtgaattcaactcacagagttgaacgatcctttacacagagcagacttgaaacactctttttgtggaatttgcaggtggagatttcagccgctttttgttcaatggtagaataggaaatatcttcctatagaaactagacagaatgattctgagaaactcctttgtgatgtgtgtgttcaactcacagagtttaacctttgctttcatagagcagttagtaaacactctgtttataaagtctgcaagtgaatattcagacccctttgaggccttcgttggaaacgggatttcttcatattatgctggacagaagaattatcagtaacttccttgtgttgtgtgtattcaactcacagagttgaacgatcctttacacagagcagacttgaaacactctttttgtggaaattgcaagtggagatttcagccgctttgaggtcaatggtagaataggaaatatcttcctatagaaactagacagaatgattctcagaaactcctttgtgatgtatgtgttcaactcacagagtttaacctttcttttcattgagcagttaggaaacactctgtttgttaagtctgcaagtggatattcagacctctttgaggccttcgatggaaacgggtttttttcatataaggctagacagaagaattcccagtaacttccttgtgttgtgtgtgttcaactcacagagttgaactctcatttacacagagcagatttgaaacactctttttgtggaatttccaagtggagatttcaagtgctttgaggccaaaggcagaaaaggaaatatcttcgtataaaaactagacagaatcattctcagaaactgctctgcgatgtgtgcgttcaactctcagagtttaacttttcttttcattcagcagtttggaaacactctgtttgtaaagtctgcacgtggataacttgaccacttagaggccttcgttggaaacgggtttttttcatataaggctagacagaagaattcccagtaacttccttgtgttgtgtgcattcaactcacagagttgaacgttcccttagacagagcagatttgaaacactctatttgtgcaatttgcaagtgtagatttcaagcgctttaaggtcaatggcagaaaaggaaatatcttggtttcaaaactagacagaatcattcccacaaactgcgttgtgatgtgttcgttcaactcacagagtttaacctttcttttcatagagcagttaggaaacactctgtttgtaaactctgcaagtggatattcagacctctttgaggccttcgttggaaacgggatttcttcatactatgctagacagaataattctcagtaacttccttgttttgtgtgtattcaactcacagagttgaacgatcctttacagagagcagacttaaaacactctttttgtggaatttgcaagtggagatttcagccgctttgaggtcaatggtagaataggaaatatcttcctatagaaactagacagaatgattctcagaaactcctttgtgatgtgtgcgttcaactcacagagtttaccctttcttttcatagagcagttaggaaacactctgtttgtaaagtctgcaagtggatattcagacatccttgaggctttcgttggaaacgggatttcttcatattctgctagaaagaagaattcccagtgacttccttgtgttgtgtgtgttcaactcacagagttgaacgttcccttagacagagcagatttgaaacactctttttgtggaatttgcaagtggagatttcaagcgctttgaggccaaaggcagaaaaggaaatatcttcgtataaaaactagacagaatcattctcagaaactgctgcgtgatgtgtgcgttcaactctcagagtttaacttttcatttcattcagcggtttggaaaccctctgtttgtaaagtctgcacgtggatattttgaccacttagaggccttcgttggaaacgggttttttgcatgtaaggctagacagaagaattcccagtaacttccttgtgttgtgtgcattcaactcacagagttgaacgttcccttagacagagcagatttgaagcactctatttgtgcaatttgcaagtgtagatttcaagcgctttaaggtcaatggcagaaaaggaaatatcttcatttcaaaactagacagaatgattctcagaaactcctttgtgatgtgtgcgttctactcacagagttcaacctttcttttcatagagcagttgggaaacactctgtttgtaaagtctgcaagtggatattcagacttctttgaggccttcgttggaagcgggatttcttcatattctgctagacagaagaattctcagaaacttccttgtgttgtgtgttttcaactcacagagttgaacgatcctttacacagagcagacttgaaacactccttttgtggaatttgcaagtggagatttcagccgctttgaggccaatggtagaataggaaatatcttcctatagaaactagacagaatgattctcagaaacttctttgtgatgtgtgcgttcaactcacagagtttaacctttcttttcatagagcagttaggaaacactctgtttgtaaagtctgcaagtggatattcagacctctttgaggccttcgttggaaacgggatttcttcatactgtgctagacagaagaattctcagtaacttccttgtgttgtgtgtattcaactcacagagttgaacgatcctttacacagagcggacttgaaacacactttttgtggaatttgcaaggggagatttcagccgcattgaggtcaatggtagaaaaggaaatatcttcgtataaaaactagacagaatcattctcagaaactgctctgcgatgtgtgcgttcaactctcagagtttaacttttcttttcattcagcagtttggaaacactctgtttgtaaagtctgcacgtggataaattgaccacttagaggccttcgttggaaacgggtttttttcacgtaaggctagacagaagaattctcagtaacttccttgtgttgtgtgtattcaactcacacagttgaacgatcctttacacagagcagacttgtaacactctttttgtggaatttgcaattggagatttcagccgctttgaagtcaaatgtagaaaaggaaatatcttcctataaaaactagacagaatgattctcataaactcctttgtgatgtgtgcgttcaactcacagagtttaacctttctgttcatagagcagttaggaaacactctgtttgtaaagtctgcaagtggatattcagacctccttgaggccttctttggaaacgggatttcttcatattctgatagacagaagaattctcagtaacttccttgtgttgtgtgtattcaactcacagagttgaacgatcctttacacagagcagacttgaaacactctttttgtggaatttgcaagaggagatttcagcagctttgaggtcaatggtagaaaaggaaactatcttcgtataaagactagacagaatgattctcagaaaatcctttgtgatgtgtgcgttcaactcacagagtttaacttttcttttcatagagcagttaggaaacactctgtttgtaaagtctgcaagtggatattcagacctctttgaggccttcgttggaaacgggatttcttcatattatgctagaccgaagaattctcagtaactgccttgtgttgtgtgtattcaactcacagagttgaacgatcctttacacagagcagacttgaaacactcttttggtggaatttgcaagtggagatttcagccgctttgaggtcaatggtagaataggaaatatcttcctatagaaactagacagaatgattctcagaaactcctttgtgatgtgtgcattcaactcacagagtttaacctttcttttcatagagcagttaggaaacactctgtttgtaaagtctgcaagtggatattcagacctctttgaggccttcgttggaaacgggatttcttcatattatgctagacagaagaattctcagtaacttccttgtgttgtgtgtattcaactcacagagttgaacgatcctttacacagagtagacttgaaacactctttttgtggaatttgcaagtggagatttcaaccgctttgaggtcaatggtagaaaaggaaatatcttcgtataaaaactagacagaatcattctcagaaactgctgcgtgatgtgtgcgttcaactctcagagtttaacttttcttttcattcagcggtgtggaaacactctgtttgtaaagtctgcacgtggatattttgaccacttagaggccttcgttggaaacgggtttttttcatgtaaggctagagaaaagaattcccagtaacttccttgtgttgtgtgcattcaactcacagagttgaacgttcccttagacagagcagatttcaaacactctatttgtgcaatttgcaagtgtagatttcaagcgctttaaggtcagtggcagaaaaggaaatatcttcgtttcaaaactagacagaatgattctcataaactcctttgtgatgtgtgcgttcaactcacaaagtttaacttttcttttcatagagcagttaggaaacactctgtttgtaaagtctgcaagtggatattcagacctctttgagaccttcgttggaaacgggatttcttcatattatgctagacagaataattctcagtaacttccttgtgttgtgtgtattcaactcacagagttgaacgatgctttacacagagcagacttgaaacattctttttgtggaatttgcaactggagatttcagccgctttgaggtcaatggtagaataggaaatatcttcctatagaaactagacagaatgattctcagaaactcctttgtgatgtgtgtgttcaactcacagagtttaacatttcttttcatagagcagttaggaaacactctgtttgtaaagtctgcaagtggatattcagacctctttgaggccttcgttggaaacgggtttttttaatataaggctagacagaacaattctcagtaacttccttgtgttgtgtgtattcaactcacagagttgaacgatcctttacacagagcagacttgaaacactatttttgtggaatttgcaagtggagatttcatccgctttgaggtcaatggtagaataggaaatatcttcctatagaaagtagacagaatgattctcagaaacttctttgtgatgtgtgcgttcaactcacagagtttaacctttcttttcatagagcagttaagaaacactctgtttgtaaagtctgcaagtggatattcagacatctttgagactctcgttggaaacgggatttcttcatattctgctagacagaagaattctcagtaacttccttgtgttgtgtgtattcaactgacagagttgaactttcatttagagagagcagatttgaaacactgtttttgtggaatttgcaagtggagatttcaagcgctttggggccaaaggcagaaaaggaaatatcttcctataaaaactagacagaatcattctctgaaactgctctgtgatgtgtgcgttcaactctcagagtttaacttttcttttcattcagcaatttggaaacactctgtttgtaaagtctgcacgtggatattttgaccacttagaggccttcgttggaaacgggtttttttcatgtaaggctagacagaagaattcccagtaacttccttgtgttgtgtgcattcaactcacagagttgaacgttcccttagacagagcagatttgaaacactctatttgtgcaatttgcaagtgtagatttcaagcgctttaaggtaatggcagaaaaggaaatatcttcgtttcaaaactagacagaatcattcccacaaactgcgttgtgatgggttcgttcaactcacagagtttaacctttctgttcatagagcagttaggaaacactctgtaaagtctgtaagtggatattctgacatcttgtggccttcgttggaaacgggatttcttcatattctgctagacagaagaattctcagaaacttccttgtgttgtgtgttttcaactcacagagttgaacgatcctttacacagagtagacttgaaacactctttttgtggaatttgcaagtggagatttcagctgctttgaggtcaatggtagaaaaggaaatatcttcctatagaaactagacagaatgattctcagaaactcctttgtgatgtgtgcgttcaactcacagagtttaaacctttcttttcatagagcagttaggaaacactctggttgtaaagtctgcaagtggatattcagacctctttgaggccttcgttggaaacgggatttcttcatattctgctagacagaagaattcccagtaacttccttgtgttgtgtgtgttcaactcacagaattgaactttcatttacacagagcagatttgaaacactctttttgtggaatttgcaagtggagatttcaagcgctttgaggccaaaggcagaaaaggaaatatcttcgtataaaaactagacagaatcattctcagaaactgctctgcgatgtgtgcgttcaactctcagagtttaacttttcttttcattcagcagtttggaaacactctgtttgtaaagtctgcacgtggatattttgaccacttaaaggccttcgttggaaacgggtttttttcctgtaaggctagacagaagaattcccagtaacttccttgtgttgtgtacattcaactcacagagttgaacgttcccttagacagagcagatttgaaacactctttttgtgcaattggcaagtggtgatttcagccgctttgtggtcaatggtataaaaggaaatatcttcgtataaaaactagacagaatgattctcagaaacttcattgtgacgtgtgcgttcaactcacagagtttaacctttcttttcatagagcagttaggaaacactctgtttgtaaactctgcaagtggatattcagacctctttgaggccttcgttggaaacgggatttcttcatactgtgctagacagaagaattctcagtaacttccttgtgctgtgtgtattcaactcacagagttgaacgatcctttacacagagcagacttgaaacactctttttgtggaatttgcaagtggagatttcagccgctttgaggtcaatagtagaaaaggaaatatcttcgtagaaaaactagacagaatgattctcagaaactccttggtgatgtgtgcgttcaactcacagagtttaacttttcttttcatagagcagttaggaaacactctgtttgtaaagtctgcaagtggatattcagacctctttgaggccttcgttggaaacgggatttcttcatattatgctagacagaagaattcccagtaacttccatgtgttgtgtgtgttcaactcacagagttgaactgtcatttacacagagcagatttgaaacactgtttttgtggaatttgcaaatggagatttcaagcggtttgaggccaaaggcagaaaaggaaatatcttcgtataaaaactagacagaaatcattctcagaaactgctctgcgatgtgtgcgttcaactctcagagtttaacttttcttttcattcagaagtttggaaacactctgtttgtaaagtctgcacgtggataacttgaccacttagaggccttcgttggaaacgggtttttttcctgtaaggctagacagaagaattctcagtaacttccctgtgttgtgtgtattcaactcacagagttgaacgatccgttacacagagcatacttgaaacactcttcttgtggaatttgcaagtggagatttcagccgctttgaggtcaatggtagaataggaaatatcttcctatagaaactagacagaatgattctcagaaactcctttctgatgtgtgcgttcaactcaaagagtttaacctttcttttcgtagagcagctaggaaacactctgtttgtaaagtctgcaagtggatattcagacctctttgaggcctacgttggaaacgggatttcttcatattatgatagacagaagaattctcagtaacttccttgtgttgtgtgtattcaactgacggatttgaactttcatttagagagagcagatttgtaacactgtttttgtggaatttgcaagtggagatttcatgcgctttggggccaaaggcagaaaaggaaatatcttcgtataaaaactagacagaatcattcccagaaactgtgtagtgatgtgtatgtttaactcacagagtttaacatttcttttcatagagcagttgggaaacgctctgtttgaaaagtctgcctgtggatatttggaccgccatgaggcgttctttggaaatggtatttcttcatttaaggctacacagaagaattctcagaatcttcccttgtgttgtgtgtattcaactcacagagttgaacgatcctttacacagagcagatttgaaacactctttttgtggaatttgcaagtggagatttcagccgctttgaggtcaatggtagaaaatgaaatatcttcgtataaaaactagacagaatgattctcagaaactcctttgtgatgtgtgcgttgaactcacagagtttaagctttcttttcatagagtagttaggaaacactctgtttgtaaaatctgcaagtggatattcagacctctttgaggccttcgttggaaacgggatttcttcatattatgctagacagaagaattctcagaaacttcgttgtgttgtgtgttttcaaatcacagagttcaacgatcctttacagagagtagacttgaaacactctttttgtggaattggcagggtggagatttcagccgctttgaggtcaatggtagaaaaggaaatatcttcgtataaaaactagacagaatgattctcagaaactcctttgtgatgtgtgtgttcaactcacagagtttaacctttcttttcatagagcagttaggaaacactctgtttgtaaagactgcaagtggatattcaggcctctttgaggccttctttggaaacgggtttttttcatataaggctagacagaagaattcccagtaacttccttgtgttgtgtgtattcaactcacagagttgaactttcatttacacagagcagatttgaaacactctttttgtggaatttgcaaatggagatttcaagccctttcaggccaaaggcagaaaaggaaatatcttcgtataaaaactagacagaatcattctcagaaactgctctgcgatgtgtgcgttcaactctcagagtttaacttttcttttcattcagcagtttggaaacactctgtttgtaaagtctgcacgtggataacttgaccacttagaggccttcgttggaaacgggtttttttcctgtaaggctagacagaagaattcccagtaacttccttgtgttgtgtacaatcaactcacagagttgaacgttcccttagacagagcagatttgaaacactctttttgtgcaattggcaaatggagatttcaagcgctttaaggtcaatggcagaaaaggaaatatcttcgtttcaaaactagacagaatcattcccacaaactgcgttgtgatgtgttcgttcaacctacagagtttaacctttcttttcatagagcagttaggaaacagtctgtttgtaaattctgtaagtggatattctgacatcttgtggccttggttggaaacgggatttcttcatattctgctagacagaagaattctcagaaacttccttgtgttgtgtgttttcaactcacagagttgaacgatgctttacagagagtagacttgaaacactctttttgtggaatttgcaagtggagatttcagccgctttgaggtcaatggtagaataggaaatatcttcctatagaaactagacagaatgattctcagaaactcctttgtgatgtgtgcgttcaactcacagagtttaacctttcttttcatagagcagttgggaaacactctgtttgtaaagtctgcaagtagatattcagacatccttgaggctttcgttggaaacgggatttcttcatattctgctagaaagaagaattctcagtaacttccttgtgttgtgggtattcaactcacagagttgaacgatcctttacacagagcagacttgaaacactctttttgtggaatttgcaagtggagatttcagccgctttgaggtcaatggtagaataggaaatatcttcctatagaaactagacagaatcattctcagaaactgctctgcgatgtgtgcgttcaactctcagagtttaacttttcttttcattcagcagtttggaaacactctgtttgtgaagtctgcacgtggatattttgtccacttagaggccttcgttggaaacgggtttttttcctgtaaggctagacagaagaattcccagtaacttccttgtgttgtgtgcattcaactcacagagttgaacgttcccttagacagagcagatttgaaacactctatttgtgcaatttgcgagtgtagatttcaagcgctttaaggtcaacggcagaaaaggaaatatcttcgtttcaaaactagacagaatcattcccacaaactgcgttgtgatgtgttcgttcaactcacagagtttaacctttctgttcatagagcagttaggaaacactctgtttgtaaagtctgcaagtggatattcagacctcctagaggccttcgttggaaacgggatttcttcgtattctgctagacagaagaattctcagtaacttccttgtgttgtgtgtatgcaactcacagagttgaacaatcctttacacagagcagacttgaaacactccttttgtggaatttgcaagtggagatttcagccgctttgaggtcaatggtagaaaaggaaactatcttcttataaagactagacagaatgattctcagaaacttctttgtgatgtgtgcgttcaactcacagagtttaacctttcttttcatagagcagttaggaaacactttgtttgtaaagtctgcaagtggatatacagacctctttgaggccttcgttggaaacgggatttcttcatactatgctagacagaagaattcccagtaacttccttttgttgtgtgtgttcaactcacagagttgaactttcatttacacagagcagattggaaacactctttttgtggaatttgccagtggagatttcaagcgcattgaggccaaaggcagaaaaggaaatatcttcgtataaaaactagacagaatcattctcagaaactgctgcgtgatgtgtgggttcaactctcagagtttaacttttcttttcattcagcggtttggaaacactctgtttgtaaagtctgcacgtggatattttgaccacttagaggccttcgttggaaaagggtttttttcatgtaaggctagacagaagaattcccagtaacttccttgtgttgtgtacattcaactcacacagttgaacgttcccttagacagagcagatttgaaacactctttttgtgcaattggcaaatggagatttcaagcgctttaaggtcaatggcaggaaaggaaatatcttcgtttcaaaactagacagaatcattctcagaaactgctctgcgatgtgtgcgttcaactctcagagtttaaattttcttttcattcagcagtttggaaacactctgtttgtaaagtctgcacgtggataacttgaccacttagaggccttcgttggaaacgggtttttttcatgtaaggctagacagaagaattctcagtaacttccttgtgttgtgtgtattcaactcacagagttgaacgatcctttacacagagcagacttgtaacactctttttgtggaatttgcaagtggagatttcagccgctttgaagtcaaagatagaaaaggaaatatcttcctataaaaactagacagaatgattctcagaaactcctttgtgatgtgtgcgttcaactcacagagtttaaccttacttttcatagagcagttaggaaacactgtgtttgtaaagtctgcaagtggatattcagacctccttgaggccttcgttggaaacgggatttcttcatattatgctagacagaagaattcccagtaacttccttgtgttgtgtgtgttcaactcacagagttgaactttcatttacacagagcagatttgaaacactctttttgtggaatttgcaattggagatttcaagcgctttgaggccaaaggcagaaaaggaaatatcttcgtataaaaactagacagaatcattctcagaaactgctctgtgatgtgtccgttcaactctcagagtttaacttttcttttcattcagcagtttggaaacactctgtttgtaaagtctgcacgtggataatttgaccacttagaggccttcgttggaaacgggtttttttcatgtaaggctagacagaagaattcccggtaacttccttgtgttgtgtgcattcaactcacagagttgaacgttcccttagtcagagcagatttgaaacattctttttgtgcaatttgcaagtggagaattcaagcgctttaaggtcaatggcagaaaaggaaatatcttagtttcaaaactagacacaatcattcccacaaactgcgttgtgatgtgttcgttcaactcacagagtttaacctttctgttcttagagcagttaggaaacactctgtttgtaaagtctgtaagtggatattctgacatcttgtggccttcgttggaaacgggatttcttcatattctgctagacagaagaattctcagtaacttccttgtgttgtgtgtattcaactcacagagttgaacgatcctttacacagagcagacttgaaacactctttttgtggaatttgcaagtggagatttcagccgctttgaggtcaatggtagaaaaggaaacatcttcgtataaagactagacagaatgattatcagaaactcctttgtgatgtgtgcgttcaactcacagagtttaacctttcttttcatagagcagttaggaaacactctgtttgtaaagtctgcaagtggatattcagacctctttgaggccttcgttggaaacgggatttcttcatattctgctagacagaagaattctcagagtcttccttgtgttgtgtgtattcaactcacagagttgaacgatcctttacacagaggagacttgaaacactctttttgtggaatttgcaagtggagatttcagccgctttgaggtccatggtagaaaaggaaatatcttcgtataaaaactagacagaatgattcttagaaactcctttgtgatgtgtgcgttcaactcacagagtttaacctttcttttcatagagcagttaggaaacactctgtttgtaaagtctgcaagtggatattcagacctctttgaggccttcgttggaaacgggtttttttcatataaggctagacagaagaattcccagtaacttcccttgtgttgtgtgcattcaactcacagagttgaacattcccttagacagagcagatttgaaacactctatttgtgcaatttgcaagtgtagatttcaagcgctttaaggtcaacggcagaaaaggaaatatcttcgtttcaaaaccagacagaatcattcccacaaactgcgttgtgatgtgtacgttcaactcacagagtttaacctttctgttcatagagcagttaggaaacactctgtttgtaaagtctgtaagtggatattctgacatcttgtggccttcgttggaaacgggatttcttcatattctgctagacagaagaattctcagtaacttccttgtgttgtgtgtattcaactcacagagttgaacgatcctttacacagagcagacttgaaacactctttttgtggaatttgcaagtggagatttcagccgctttgaggtcaatagtagaaaaggaaatatcttcgtagataaactagacagaatgattctcagaaactcctttgtgatgtgtgcgttcaactcacagagtttaacctttcttttcatagagcagttaggaaacactctgtttgtaaagtctgcaagtggatattcagacctctttgaggccttcgttggaaacgggtttttttcatataaggctagacagaaggattcccagtaacttcccttgtgttgtgtgtgttcaactcacagagttgaactttcatttacaaagagcagatttgaaacactctttttgtggaatttgcaagtggagatttcaagcgctttgaggccaaaggcagaaaaggaaatatcttcgtataaaaactagacagaatcattctcagaaactgctgcgtgatgtgtgcgttcaactctcagagtttaacttttcttttcattcagcggtttggtaatactgtgtttgtaaagtctgcacgtggatattttgaccacttagaggccttcgttggaaacgggtttttttcatgtaaggctagacagaagaattcccagtaacttccttgtgttctgtgcattcaactcacagagttgaacgttcccttagacagagcagatttgaaacactctatttgtgcaatttgcaagtgtagatttcaagcgctttaaggtcaatggcagaaaaggaaatatcttcgtttcaaaactagacagaatcattcccacaaactgcgttgtgatgtgttcggttcaactcacagagtttaacctttcttttcatagagcagttaggaaacagtctgtttgtcaattctgtaagtggatattctgacatcttgtggccttcgttggaaacgggatttcttcatattctcctagacagaagaattctcagtaacttccttgtgttgtgtgtattcaactcacagagttgaacgatcctttacacagagcagacttgaaacactctttttgtgaaatttgcaagtggagatttcagccgatttgtggtcaatggtagaataggaaatatcttcctatagaaactagacagaatgattctcagaaacttctttgtgatgtgtgcgttcaactcacagagtttaacctttcttttcatagagcagttaggaaacactctgtttgtaaactctgcaagtggatattcagacctctttgaggccttcgttggaaaccggatttcttcatactgtgctagacagaagaattctcagtaacttccttgtgttgtgtgtattcaactcacagagttgaacgatcctttacacagagcagacttgtaacactctttttgtggaatttgcaagtggagatttcagccgctttgaggtcaatggtagaaaaggaaatatcttcctataaaaactagacagaatcattctcagaaactgctctgcgatgtgtgcgttcaactctcagagtttaactttgcttttcattcagcagtttggaaacactctgtttgtaaagtctgcacgtggataatttgaccacttagaggccttcgttggaaacgggtttttttcatgtaaggctagacagaagaattcccagtaacttccttgtgttgtgtgcattcaactcacagagttgaacgttcccttagacagagcagatttgaaaaactctatttgtgcaatttgcaagtgtagatttcaagcgctttaaggtcaacggcagaaaaggaaatatcttcgtttcaaaactagacagaatgattctcagaaactcctttgtgatgtgtgcgttcaactcacagagtttaacttttcttttcatagaccagttaggaaacactctgtttgtaaagtctgcaagtggatattcagacctctttgaggccttcgttggaaacgggatttcttcatattatgctagacagaataattctcagtaacttccttgtgttgtgtgtattcaactgacagagttgaacgatcctttacacagagcagacttgaaacactctttttgtggaatttgcaagtggagatttcagccgctttgaggtcaatagtagaaaaggaaatatcttcgtagaaaaactagacagaatgattctcagaaactcctttgtgatgtgtgcgttcaactcacagagtttaacctttcttttcatagagcagttaggaaacactctgtttgtaaagtctgcaagtggatattcagacttccttgaggccttcgttggaaacaggatttcttcatatttctgctagacagaagaattcccagtaacttcccttgtgttgtgtgtgttcaactcacagagttgaactttcatttacacagagcagatttcaaacactctttttgtggaatttgcaagtggagatttcaagcgctttgaggccaaaggcagaaaaggaaatatcttcgtataaaaactagacagaatcattctcagaaactgctctgtgatgtgtgcgttcaactctcagagtttaacttttcttttcattcagcagtttggaaacactctgtttgtaaagtctgcacgtggataatttgaccacttagaggccttcattggaaaagggtttttttcatgtaaggctagacagaagaattctcagtaacttccttgtgttgtgtgtattcaactcacagagttgaacgttcccttagacagagcagatttgaaacactctatttgtgcaatttgcaagtgtagttttcaagctctttaaggtcaacggcagaaaaggaaatatcttcgtttcaaaactagacagaatcattcccacaaactgcgttgtgatgtgttcgttcaactcacagagtttaacctttctgttcacagagcagttaggaaacactctgtttgtaaagtctgtaagtggatattctgacatcttgtggccttcgttggaaacgggatttcttcatattctgctagacagaagaattctcagaaacttcgttgtgttgtgtgttttcaactcacagagttcaacgatcctttacacagagtatacttgaaacactctttttgtggaattggcagggtggagatttcagccgctttgaggtcaatggtagaaaaggaaatatcttcgtataaaaactagacagagtgattctcagaaactcctttgtgatgtctgcgttcaactcacagagtttaaactttcttttcatagagcagttaggaaacactctgtttgtaaagtctgcaagtggatattcagacctccttgaggccttcgttggaaacgggatttcttcatattctgctatacagaagaattcccagtaacttccttgtgttgtgtgtgttcaactcacagagttgaactttcatttagacagagcagatttgaagcactctttttgtggaatttgcaagtagagatttcaagcgctttgaggccaaaggcagaaaaggtaatatcttcgtttcaaaactagccagaatcattctcagaaactgctctgcgatgtgtgcgttcaactctcagagtttgacttttcttttcattcagcagtttggaaacactctgtttgtaaagtctgcacgtggataatttgaccacttagaggccttcattggaaacgggtttttttcatgtaaggctagacagaagaattcccagtaacttaccttgtgttgtgtacattcaactcacagagttgaacgttcccttagacagagcagatttgaaacactctttttgtgcaattggcaagtggagatttcaagcgctttaaggtcaatggcagaaaaggaaatatcttcgtttcaaaactagacagaatcattcccacaaactgcgttgtgatgtgttcgttcaactcacagagtttaacctttcttttcctagagcagttaggaaacagtctgtttgtcaattctgtaagtggatattctgacatcttgtggccttcgttggaaacgggatttcttcatattctgctagacagaagaattctcagtaacttcatagtgttgtgtgtattcaactcacagatttcaacgatcctttacaaagagcagacttgaaacactctttttgtggaatttgcaagtggagatttcagccgctttgaggtcaatggtagaataggaaatatcttcctatagaaactagacagaatgattctcagaaacttctttgtgatgtgtgcgttcaactcacagagtttaacctttcttttcatagagcagttgggaaacactctgtttttaaagtctgcaagtggatattcagacctctttgaggccttcgttggaaacgggtttttttcatgtaaggctagacagaagaattctcagtaacttccttgtgttgtgtgtattcaactgacagagttgaactttcatttagagagagcagatttgaaacactgtttttgtggaatttgcaagtggagatttcaagcgctttggggccaagggcagaaaaggaaatatcttcgtataaaaactagacagaatcattctcagaaactgctgcgtgatgtgtgcgttcaactctcagagtttaacttttcttttcattcagcggtttcgaaacactctgtttgtaaagtctgcacgtggatattttgaccacttagaggccttcgttggaaacgggtttttttcatgtaaggctagacagaagaattctcagtaacttccttgtgttgtgtgtattcaactcacagagttgaacgatcctttacacagagcagacttgaaacattctttttgtggaatttgcaagtggagatttcaaccgctttgaggtcaatggtagaataggaaatatcttcctatagaaactagacagaacgattctcagaaactcctttctgatgtgtgcgttcaactcacagagtttaacctttcttttcatagagcagttaggaaacactctgtttgtaaagtctgcaagtggatattcagacctctttgaggccttcgttggaaacgggatttcttcatattctgctagacagaagaattctcagtaacttccttgtgttgtgtgtattcaactcacagagttgcacgaccctttacacagagcagacttgaaacactctttttgtggaatttgcaagtggagatttcagccgctttgaggtcaatagtagaaaaggaaatatcttcgtagaaaaactacacagaatgattctcagaaaatcttttgtgatgtgtgcgttcaacacacagagtttaacttttcttctcatagagcagttaggaaacactctgtttgtaaagtctgcaagtggatattcagacctctttgaggccttcgttggaaacgggatttcttcatattatgctagacagaagaattctcaggaacttccttgtgttgtgtgtattcaactgacagagttgaactttcatttagagagagcagatttgaaacactgtttttgtggaatttgcaagtggagattccaagcgctttggggccaaagccagaaaaggaaatatcttcgtagaaaaactagacagaatcattctcagaaactgctctgcgatgtgtgcgtccaactctcagagtttaacttttcttttcattcagcagtttgcaaacactctgtttgtaaagtctgcacgtggatattttgaccacttagaggccttcgttggaaacgggatttcttcatactatgctagacagaagaattctcagtaacttccttgtgttgtgtgtattcaactcacagagttgaacgatcctttacaaagagcagacttgtaacactctttttgtggaatttgcaagtggagatttcagccgctttgaagtcaaagatagaaaaggaaatatcttcctataaaaactagacagaatgattctcagaaactcctttgtgatgtgtgcgttcaactcacagagtttaaccttccttttcatagagcagttaggaaacactctgtttgtaaagtctgcaagtggatattcagacctccttgaggccttcgttggaaacgggatttcttcatattatgctagacagaagaattctcagtaacttccttgtgttgtgtgtattcaactcacagagttgaacgatcctttacacagagcggacttgaaacactcgttttgtggaatttgcaagtggagatttcagccgtgttgaggtaaatggtagaaaaggaaatatcttcgtataaaaactagacagaatgattctcagaaactcctttgtgatgtgttcgttcaactcacagagttcaacctttcttttcatagagcagttgggaaacactctgtttgtaaagtctgcaagtggatattcagacttctttgaggccttcgttggaagcgggatttcttcatattctgctagacagaagaattcccagtaacttccttgtgttgtgtgtgttcaactcacagagttgaactttcatttacacagagcagatttgaaacactctttttgtggaatttgcaaatggagatttcaagcgctttgaggccaaatgcagaaaaggaaatatcttcgtataaaaactagacagaatcattctcagaaactgctctgcgatgtgtgcgttcaaccctcagagtttaacttttcttttcattcagcagtttggaaacactctgtttgtaaagtctgcacgtggatattttgaccacttagaggccttcgttggaaacgggtttttttcctgtaaggctagacagaagaattcccagtaacttccttgtgttgtgtacattcaactcacagagttgaacgttcccttagacagagcagatttgaaacactctttttgtgcaattagcaagtggagatttcaagcgctttaaggtcaatggcagaaaaggaaatatcttactttcaaaactagacagaatcattccgacaaactgcgttgtgatgtgttcgttcaactcacagagtttaacctttctgttcatagagcagttaggaaacactctgtttgtaaagtctgtaagtggatattctgacatcttgtggccttcgttggaaacgggatttcttcatattctgctggacagaagaattctcactaacttccttgtgttgtgtgtattcaactcacagagttgaacgatcctttacacagagcagacttgaaacactctttttgtggaatttgcaagtggagatttcagtcgctttggggtcaatagtagaaaaggaaatatcttcgtagaaaaactagacagaatgattctcagaaactcctttgtgatgtgtgcgttcaactcacagagtttaacctttcttttcatagagcagttaggaaacactctgtttgtaaagtctgcaagtggatattcagacctccttgaggccttcgttggaaacgggatttcttcatatgatgctagacagaagaattcccagtaacttccttgtgttgtgtgtgttcaactcacagagtagaactttcatttacacagagcagatttgaaacactctttttgtggaatttgcaagtggagatttcaagcgctttgaggccaaaggcagaaaaggaaatatcttcgtataaaaactagacagaatcattctcagaaactgctctgcgatgtgtgcgttcaactctcagagtttaacttttcttttcattcagcagtttggaaacactctgtttgtaaagtctgcacgtggatattttgaccatttagaggccttcgttggaaacgggtttttttcttgtaaggctagacagaagatttcccagtaacttccttgtgttgtgtacattcaactcacagagttgaacgttcccttagacagagcagatttgaaacactctttttgtgcaattggcaagtggagatttcaagcgctttaaggtcaatggcagaaaaggaaatatcttcgtttcaaaactagacagaatcattcccacaaactgcgttgtgatgtgttcgttcaactcacagagtttaacctttctgttcatagagcagttaggaaacactgtgtttgtaaagtctgtaagtggatattcagacctccttgaggccttcgttggaaacgggatttcttcatattctgctagacagaagaattctcactaacttccttgtgttgtgtgtattcaactcacagagttgaacgatcctttacacagagcagacttgaaacactctttttgtagaattggcaagtggagatttcagccgctttgaggtcaatggtagaaaaggaaatatcttcgtataaagactagacagaatgattctcagaaactcctttgtgatgtgtgcgttcaactcacagagtttaacttttcttttcatagagcagttaggaaacactctgtttgtaaagtctgcaagtggatattcagacctctttgtggcctttgttggaaacgggatttcttcatattatgctagacagaagaattctcagtaacttccttgtgttgtgtgtattcaactgacagagttgaactttcatttagagagagcagatttgaaacactgtttttgtggaatttgcaaatggagatttcaagcgctttggggccaaaggcagaaaaggaaatatcttcgtataaaaactagaaagaatcattctcagaaactgctctgcgatgtgtgcgttcaactctcagagtttaacttttcttttcattcagcagtttggaaacactctgtttgtaaagtctgcacgtggatattttgaccacttagaggccttcgttggaaacgagattttttcctgtaaggctagacagaagaattcccagtaacttccttgtgttgtgtgcattcaactcacagagttgaaccttcccttagacagagcagatttgaaacactctatttgtgcaatttgcaagtgtagatttcaagcgctttaaggtcaatggcagaaaaggaaatatcttcgtttcaaaactagacagaatcattcccacaaactgcgttgtgatgtgctcgttcaactcacagagtttaacctttctgctcatagagcagttaggaaacactctgtttgtaaagtctgtaagtggatattctgacatcttgtggccttcgttggaaacgggatttcgtcatattctgctagacagaagaattctcagtaacttccttgtgttgtgtgtattcaactcacagagttgaacgatcgtttacacagagcagacttgtaacactctttttgtggaatttgcaagtggagatttcagccgctttgaagtcaaaggtagaaaaggaaatatcttcctataaaaactagacagaatgattctcatgaactcctttgtgatgtgtgcgttcaactcacagagtttaacctttcttttcatagagcagttaggaaacactctgtttgtaaagtctgcaggtggatattcagacctccttgaggccttcgttggaaacgggatttcttcatattctgctagacagaagaattcccagtaacttcccttgtgttgtgtgtgttcaactcacagagttgaactttgatttacacagagcagatttgaaacactctttttgtggaatttgcaagtggaaatttcaagcgctttgaggccaaaggcagaaaaggaaatatcttcgtataaaaactagacagaatcattctcagaaactgctctgcgatgtgtgcgttcaactctcagagtttaacttttcttttcattcagcagtttggaaacactctgtttgtaaagtctgcacgtggatattttgaccacttagaggccttcgttggaaacgggtttttttcctgtaaggctagacagtagaattcccagtaacttccttgtgttgtgtacattcaactcacagagttgaacgttcccttagacagagcagatttgaaacactctttttgtgcaattggcaaatggagatttcaagggctttaaggtcaatggcaggaaaggaaatatcttcgtttcaaaactagacagaatcattcccacaaactgcgttgtgacgtgttcgttcaactcacagagtttaacctttctgttcatagagcagttaggaaacactctgtttgtaaagtctgcaagtggatattcagacctccttgaggccttcgttggaaacgggatttcttcatattatgctagacagaggaattctcagtaacttccttgtgttctgtgtattcaactgacagagttgaacgatcctttacacagagcagacttgaaacactctttttgtggaatttgcaagtggagatttcagccgctttgaggtcaatggtagaaaaggaaactatcttcgtatacagactagacagaatgtttctcagaaactgctttgtgatgtgtgcgttcaactcacagagttcaacctttcttttcatagagcagttgggaaacactctgtttgtaaagtctgcaagtggatattcagacttctttgaggccttcgttggaagcgggatttcttcatattctgctagacagaagaattcccagtaacttaccttgtgttgtgtgtgttcaactcacagagatgaactctcatttacacagagcagatttgaaacactctttttgtggaatttgcaagtggagatttcaagcgctttgaggccaaaggcagaaaaggaaatatcttcgtataaaaactagacaaaatcattctcagaaactgctgcgtgatgtgtgcgttcaactctcagagtttaacttttcttttcattcagcggtttggaaacactctgtttgtaaagtcggcacgtggatattttgaccacttagaggccttcgttggaaacgggtttttttcatgtaaggctagacagaagaattcccagtaacttccttgtgttgtgtgcattcaactcacagagttgaacgttcccttagacagagcagatttgaaacactctatttgtgcaatttgcaagtgtagatttcaagcgatttaaggtcaatggcagaaaaggaaatatcttcgtttcaaaactagacagataatcattcccacaaactgcgttgtgatgtgttcgttcaactcacagagtttaacctttccgttcatagagcagttaggaaacacactgtttgtaaagtctgtaagtggatattctgacatcttgtggccttcgttggaaacgggatttcttcatattctgctagacagaaagaattctcagtaacttccttgtgttgtgtgtattcaactcacagcagttgaacgatcctttacagagagcagacttgaaacactctttttgtggaatttgcaagtggagatttcagccgctttgaggtcaatggtagaataggaaatatcttcctatagaaactagacagaatgattctcagaaactcctttgtgatgtgtgcgttcaactcacagagttcaacctttcttttcatagagcagttgggaaacactctatttgtaaagtctgcaagtggatattcagacttctttgaggccttcgttggaagcgggatttcttcatattctgcttgacagaagaattcccagtaacttcccttgtgttgtgtgtgttcaactcacagagttgaactttcatttacacagagcagatttgaaatactctttttgtggaatttgcaggtggagatttcaagcgctttgaggccaaaggcagaaaaggaaatatcttcgtataaaaactagacagaatcattctcagaaactgctctgtgatgtgtgcgttcaactctcagagtttaacttttcttttcattcagcagtttgtaaacactcagtttgtaaagtctgcacgtggatattttgaccactcagaggccttcgttggaaacgggtttttttcatgtaaggctagacagaagaattccgagtaacttccttgtcttgtgtgcattcaactcacagagttgaacgttcccttagacagagcagatttgaaacactctttttgtgcaatttgcaagtggagatttcaagcgatttagggtcaatggcagaaaaggaaatatcttcgtataaaaactagacagaatcattcccacaaactgcgttgtgatgtgttcgttcaactcacagagtttaacgtttctgttcatagagcagttaggaaacactctgtttgtaaagtctgcaagtggatattcagacctccttgaggccttcgttggaaacgggatttcttcatattctgctagacagaagaattctcagtaacttctttgtgttgtgtgtattcaactcacagagttgaacgatcctttacacagagcagtcttgaaacactctttttgtggaatttgcaagtggagatttctgccgctttgaggtcaatggtagaataggaaatatcttcctatagaaactagacagaatgattctcagaaactcctttgtgatgtgtgcgttcaactcacagagttcaacctttcttttcatagagcagttgggaaacactctgtttgtaaagtctgcaagtggatattcagacttctttgaggccttcgttggaagcggaatttcttcatgttctgctagacagaagaattctcagtaacttccttgtgttgtgtgtattcaactcacagagttgaacgatcctttacacagagcagacttggaacactctttttgtggaatttgcaagtggagatttcagccgcgttgaggtcaatggtagaaaaggaaatatcttcctataaaaactagacagaatgattctcagaaactcctttgtgatgtttgctttcaaatcacagagtttaacctttcttttcatagagcagttaggaaacactctggttgtaaagtctgcaagtggatattcagacctctttgaggccttcgttggaaacgggatttcttcatattctgctagacagaagaattcccagtaacttccttgtgttgtgtgtgttcaactcacagatttgaactttcatttacacagagcagatttgaaacactctttttgtggaatttgcaaatggagatttcaagcgctttgaggccaaaggcagaaaaggaaatatcttcgtataaaaactagacagaatcattctcagaaactgctctgcgatgtgtgccttcaactcacagagtttaacttttcttttcattcagcagtttggaaacactctgtttgtaaagtctgcacgtggatattttgaccacttagaggccttcgttgcaaacgggtttttttcctgtaaggctagacagaagaattcccagtaacttccttgcgttgtgtacattcaactcacggagttgaacgttcccttagacagagcagatttgaaacactctttttgtgcaattggcaagtggagatttcaagcgctttgaggtcaatggtagaaaaggaaatatcttcgtttcaaaactagacagaatcattcccacaaactgcgttgtgatgtgttcgttcaacacacagactttaacctttcttttcatagagcagttaggaaacagtctgtttgtaaattctgtaagtggatattctgacatcttgtggccttcgttggaaacgggatttcttcatattctgctagacagaagaattctcagtaacttccttgtgttgtgtgtattcaactcacagagttgaacgatcctttacacagagcagacttgaaacactctttctgtggaatttgcaagtggagatttcaaccgctttgaggtcaatagtagaaaaggaaatatcttcgtagaaaaactagacagaatgattctcagaaactcctttgtgatgtgtgtgttcaactcacagagtttaacctttcttttcatagagcagttagtaaacactctgtttataaagtctgcaagtggatattccaacccctttgaggccttcgttggaaacgggatttcttcatattatgctagacagaagaattcccagtaacttccttgtgttgtgtgtgttcaactcacagagttgaactttcatttacacagagcagatttgaaacactctttttgtggaatttgctaatggagatttcaagcgctttgaggccaaaggcagaaaaggaaatatcttcgtataaaaactagacagaatcattctcagaaactgctgcgtgatgtgtgtgttcaactctcagagtttaactttccttttcattcagcggtttggaaacactctgtttgtaaagtctgcacgtggatattttgaccacttagaggccttcgttggaaacgggtttttttgtatgtaaggctagacagaagaattcccagtaacttccttgtgttgtgcgcattcaactcacagagttgaacgttcccttagacagagcagatttgaaacactctatttgtgcaatttgcaagtgtagatttcaagcgctttaaggtcaagggcagaaaaggaaatatcttcgtttcaaaactagacagaatgattctcagaaactcctttgtgatgtgtgcgttcaactcacagagtttaacctttctgttcatagagcagttaggaaacactctgtttgtaaagtctgcaagtggatattcagacctccttgaggccttcgttggaaacgggatttcttcatattctgcttgacagaagaattctcagtaacttccttgtgttgtgtttattcaactcacagagttgaatgatcctttacacagagcagacttgaaacactctttttgtggaatttgcaagtggagatttcagccgctttgaggttaatggtagaaaagtaaatatcttcgtataaagactagacagaatgattctcagaaacttctttgtgatgcgtgcgttcaactcacagagtttaacctttcttttcatagagcagttaggaaacactctgtttgtaaactctgcaagtggatattcagacctctttgaggccttcgttggaaacgggatttcttcatactatgctagacagaagaattctcagtaacttctttgtgttgtgtgtattcaactgacagagttgaactttcatttagagagagcagatttggaacactgtttttgtggaatttgcaagtggagatttcaagcgctttggggccaaaggcagaaaaggaaatatcttcgtataaaaactagacagaatcattctcagaaaccgctctgtgatgtgtgcgttcaactcgcagagtttaacttttcttttcattcagcagtttggaaacactctgtttgtaaagtctgcacgtggatattttgaccacttagaggccttcgttggaaacgggttttttttcatgtaaggctagacggtagcattcccagtaacttccttgtgttgtgtgcattcaactcacagagatgaatgttcccttagacagagcagatttgaaacactctatttgtgcaatttgcaagtgtagatttcaagcgctttaaggtcaatggcagaaaaggaaatatcttcgtttcaaaactagacagaatcattcccacaaactgcgttgtgatgtgttcgttcaactcacagagtttaacctttctgttcatagagcagttaggaaacactctgtttgtaaagtctgcaagtggatattcagacctccttgaggccttcgttggaaaccggatttcttcatattctgctagacagaagaattctcagtaacttccttgtgttgtgtgtattcaactcacagagttgaacgatgctttacacagagcagacttgaaacactctttttgtggaatttgcaagtggagatttcagccgctttgaggtcaatggtagaaaaggaaatatcttcgtataaagactagacagaatgattctcagaaactcctttgtgatgtgtgtgttcaactcacagagtttaacctttcttttcatagagcatttagtaaacactctgtttataaagtctgcaagtggatattcagacccctttgaggccttcgttggaaacgggatttcttcatattatgctagacagaagaattcccagtaacttccttgtgttgtgtgtgttcaactcacagagttgaactttcatttacacagagcagatttgaaacactcttttcgtggaatttgcaaatggagatttcaagcgctttgaggccaaaggcagaaaaggaaatatcttcgtataaaaactagacagaatcattctcagaaactgctctgcgatgtgtgcgttcaactctcagagtttaactttgcttttcattcagcagtttggaaacactctgtttgtaaagtctgcacgtggataatttgaccacttagaggccttcgttggaaacgggtttttttcatgtaaggctagacagaagaattcccagtaacttccttgtgttgtgtgcattcaactcacagagttgaacgttcccttagacagagcagatttgaaacactctgtgcaatttgcaagtgtagatttcaagcgctttacggtcaatggcagaaaaggaaatatcttcgtttcaaaactagacagaatcattcccacaaactgcgttgtgatgtgttcgttcaactcacagagtttaacctttcttttcatagagcagttaggaaacaatctgtttgtaaattctgtaagtggatattctgacatcttgtggccttcgttggaaacgggatttcttcatattctgctagacagaagaattctcagtaacttccttgtgttgtgtgtattcaactcacagagttgaacgatcctttacacagagcagacttgtaacactctttttgtggaatttgcaagtggagatttcacccgctttgaagtcaaaggtagaaaaggaaatatcttcctataaaaactagacagaatgattctcagaaactcctttgtgatgtgtgcgttcaactcacagtgtttaacctttcttttcatagagcagttaggaaacactctgtttgtaaagtctgcaagtggatattcagacctccttgaggccttcgttggaaacgggattttttcatataaggctagacagaagaattcccagtaacttccttgtgttgtgtgtgttcaactcacagagttgaactttcatttacgcagagcagatttgaaacactctttttgtggaatttgcaagtggagatttcaagcgctttgaggccaaaggcagaaaaggaaatatcttcgtttcaaaactagacagaatgattctcagaaactcctttgtgatgtgtgcgttcaactcacagagtttaacttttcttttcattcagcggtttggaaacactctgtttgtaaagtctgcacgtggatattcagacctctttgaggccttcgttggaaacgggtttttttcatgtaaggctagacagaagaattcccagtaacttccttgtgttgtgtacattcaactcacagagttgaacgttcccttagacagagcagatttgaaacactctttttgtgcaattggcaagtggtgatttcagccgctttgaggtcaatggtagaaaaggaaatatcttcgtataaaaactagacagaatcattcccacaaactgcgttgtgatgtgttcgttcaactcacagcagtttaacctttctgttcatagagcagttaggaaacactctgtttgtaaagtctgtaagtggatattctgacatcttgtggccttcgttggaaacgggatttcttcatattctgctagacagaatacttctcagtaacttccttgtgttgtgtgtattcaactcacagagttgaacgatcctttacagagagcagacttgaaacactctttttgtggaatttgcaagtggagatttcagccgctttgagctcaatggtagaataggaaatatcttcctatagaaactagacagaatgattctcagaaactcctttgtgatgtgtgcgttcaactcacagagtttaacctttcttttcatagagcagttaggaaacactctgtttgtaaagtctgcaagtggatattcagacatctttgaggcgttcgttggaaacgggatttcttcatgttctgctagacagaagaattcccagtaacttccttgtgttgtgtgtgttcaactcacagagttgaactttcatttacccagagcagatttgaaacactctttttgtggaatttgcaagtggagatttcaagcgatttgaggccaaaggcagaaaaggaaatatcttcgtttcaaaactagacagaatcattctccgaagctgctgcgtgatgtgtgcgttcaactctcagagtttaacttttcttttcattcagcggtttggaaacactctgtttgtgaagtctgcacgtggatattttgaccacttagaggccttcgttggaaacgggttttttgcatgtaaggctagacagaagaattcccagtaacttccttgtgttgtgtacattcaactcacagagttgaacgttcccttagacagagcagatttgaaacactctttgtgcaattggcaagtggagatttcaagcgctttaaggtcaatggcagaaaaggaaatatcttcgtttcaaaactagacagaatgattctcagaaactcttttgtgatgtgtgcgttcaactcacagagtttaacctttcttttcatagagcagttaggaaacactctgtttgtaaagtctgcaagtggatattcagacatccttgaggctttcgttggaaacgggatttcttcatattatgctagacagaagaattctcagtaacttccttgtgttgtgtgtattcaactcacagagttgaacgatcctttacacagagcagacttgaaacactccttttgtggaatttgcaagtggagatttcagccgctttgaggtcaatggtagaataggaaatatcttcctatagaaactagacagaatgattctcataaactcctttgtgatgtgtgagttcaaatcacagagtttaacttttcttttcatagagcagttaggaaacactctgtttctaaagtctgcaagtggatattcagatctctttgaggccttcgttggaaacgggatttcttcatattatgctagacagaagaattctcaggaacttccttgtgttgtgtgtattcaactcacagagttgaactttcatttacacagagcagatttgaaacactctttttgtggaatttgcaaatggagatttcaagcgctttgaggccaaaggcagaaaaggaaatatcttcgtataaaaactagacagaatcattctcagaaactgctgcgtgatgtgtgcgttcaactctcagagtttaacttttcttttcattcagcggtttggaaacactctgtttgtaaagtctgcacgtggatattttgaccagttagaggccttcgttggaaacgggtttttttcatgtaaggctagacagaagaattctcagtaacttccttgtgttgtgtgtattcaactcacagagttgaacgatcctttacacagagcagacttgaaacaatctttttgtggaatttgcaagtggagatttcagccgatttgaggtcaatggtagaaaaggaaatatcttcgtataaaaactagacagaatgattctcagaaactcctttgtgatgtgtgcgttcaactcacagagtttaacctttcttttcatagagcagttaggaaacactctgtttgtaaagtctgcaagtggatattcagacctccttgaggccttcgttggaaacgggatttcttcattttatgctagacagaagaattctcagtaacttccttgtgttgtgtgtattcaactcacagagttgaacgatcctttacacagagcatacttgaaacactcttgttgtggaatttgcaagtggagatttcagccgctttgaggtcaatggtagaataggaaatatcttcctatagaaactagacagaatgattctcagaaactcctttgtgatgtgtgcgttcaagtcacagagtttaacctttcttttcatagagtagttaggaaacactctgtttgtaaagtctgcaagtggatattcagacctctttgaggccttcgttggaaacgggtttttttcatataaggctagacagaagaattcccagtaacttccttgtgttgtgtgtgttcaactcacagagttgaactttcatttacccagagcagatttgaaacactctttttgtggaatttgcaaatggagatttcaagcgctttgaggccaaaggcagaaaaggaaatatcttcgtttcaaaactagacagaatgattctcagaaactcctttgtgatgtgtgcgttcaactcacagagtttaacctttgttttcattcagcggtttggaaacactctgtttgtaaagtctgcacgtggatattcagacctctttgaggccttcgttggaaacgggtttttttcatgtaaggctagacagaagaattcccagtaacttccttgtgttgtgtgcattcaactcacagagttgaacgttcccttagacagagcagatttgaaacactctatttgtgcaatttccaagtgtagatttcaagcgctttaaggtcaacggcagaaaaggaaatatcttcgtttcaaaactagacagaatcattcccacaaactgcgttgtgatgtgctcgttcaactcacagagtttaacctttcttttcatagagcagttaggaaacagtctgtttgtaaattctgtaagtggatattctgacatcttgtggccttcgttggaaacgggatttcttcatattctgctagacagaagaattctcagaatcttccttgtgttgtgtgtattcaactcacagagttgaacgatcctttacacagagcagacttgaaacactctttttgtggaatttgcaattggagatttcagccgctttgaggtccatggtagaaaaggaaatatcttcgtataaaaactagacagaatgattctcagaaactcctttgtgatgtgtgcgttcaactcacagagtttaacctctcttttcatagagcagttgggaaacactctgtttgtaaagtctgcaagtggatattcagacatccttgaggctttcgttggaaacgggatttcttcatattctgctagaaagaagaattctcagtaacttccttgtgttgtgtgtattcaactgacagagttgaactttcatttagagagagcagatttataacactgtttttgtggaatttgcaagtggagatttcagccgctttggggccaaaggccgaaaaggaaatatcttcgtataaaaactagacagaatcattctcagaaaatgctctgtgatgtgtgcgttcaactctcagagtttaacttttcttttcattcagcactttggaaacactctgtttgtaaagtctgcacgtggatattttgaccacttagaggtctttgttggaaacgggtttttttcacgtaaggctagacagaagaattcccagtaacttccttgtgttgtgtgcattcaactcacagagttgaacgttcccttagacagagcagatttgaaacactctatttgtgcaatttgcaagtatagatttcaagcgctttaaggtcaacggcagaaaaggaaatatcttcgtttcaaaactagacagaatcattcccacaaactgcgttgtgatgtgttcgttcaactcacagaggttaacctttctgttcatagagcagttaggaaacactctgtttgtaaagtctgcaagtggatattcagacctccttgaggccttcgttggaaacgggatttcttcatattctgctagacagaagaattctcagtaacttccttgtgttgtgtgtattcaactcacagtgttgaacgatcctttacacagagcagactagaaacactctttttgtggaatttgcaagtggagatttcagccgctttgaggtcaatggtagaaaaggaaatatcttccctcctataaaaactagacagaatgattctcagaaactcctttgtgatgtgtgcgttctactcacagagtttaacctttcttttcatagagcagttaggaaacactctgtttgtaaagtctgcaagagaatattcagacatctttgagactttcgttggaaacgggatttcatcatattctgctagacagaagaattcccagtaacttccttgtgttgtgtgtgttcaactcacagagttgaactttcatttacccagagcagatttgaaacactcttttagtggaatttgcaagtggagatttcaagcgctttgaggccaaaggcagaaaaggaaatatcttcgtttcaaaactagacagaatcattctcagaaactgctgcatgatgtgtgcgttcaactctcagagtttaacttttcttttcattcagcggtttggaaacactctgtttgtaaagactgcacgtggatattttgaccacttagaggccttcgttggaaacgggttttttttcatgtaaggctagacagaagaattcccagtaacttccttgtgttgtgtacattcaactcacagagttgaacgttcccttagacagagcagatttgaaatactctttttgtgcaattggcaagtggagatttcaagagctttaaggtcaatggcagaaaaggaaatatcttcgtttcaaaactagacagaatcattcccacaaactgcgttgtgatgtgttcgttcaactcacagagtttaaactttctgttcatagagcagttaggaaacactctgtttgtaaagtctgtaagtggatattctgacatcttgtggccttcgttggaaacgggatttcttcatattctgcttgacagaagaattctcagtaacttccttgtgttgtgtgtattcaactcacagagttgaacgatcttttacacagagcagacttgaaacactctttttgtggaatttgcaagtggagatttcagccgctttcaggtcaatagtagaaaaggaaatatcttcgtagaaaaactagacagaacgattgtcagaaactcctttatgatgtgtgcgttcaactcacagagtttaacctttcttttcatagagcagttaggaaacactctgtttgtaaattctgcaagtggataatcagacctctttgaggccatcgttggaaacgggatttcctcatattctgctagacagaagaattcccaataacttccttgtgttgtgtgtgttcaactcacagagttgaactttcatttacacagagcagatttgaaacactctttttgtggaatttgcaagtggagatttcaagcgctttgaggccaaaggcagaaaaggaaatatcttcgtttcaaaactagacagaatcattctcagaaactgctctgcgatgtgtgcgttcaactctcagagtttaacttttcttttcattcagcagtttggaaacactctgtttgtaaagtctgcacgtggataatttgaccacttagaggtcttcgttggaaacgggtttttttcatgtaaggctagactgaagaattcccagtaacttccttgtgttgtgtacattcaactcacagagttgaacgttcccttagacagagcagatttgaaacactctttttgtgcaattggcaaatggagatttcaagcgctttaaggtcaatggcagaaaaggaaatatcttcgtttcaaaattagacagagaatcattcccacaaactgcgttgtgatgtgttcgttcaactcacagcagtttaacctttcttttcatagagcagttaggaaacagtctgtttgtaaattctgtaagtggatattctgacatcttgtggccttcgttggaaacgggatttcttcatattgtgctagacagaagaattctcagaatcttccttgtgttgtgtgtattcaactcacagagttgaacgatggtttacacagagcagatttgaaacactctttttgtggaatttgcaagtggacatttcagccgctttgaggtcaatggtagaaaaggaaatatcttcgtataaaaactagacagaatgattctcagaaactcctttgtgatgtgtgcgttctactcacagagtttaacctttcttttcatagagcagttaggaaacactctgtttgtaaagtctgcaagtggatattcagacatctttgagactttcgttggaaacgggatttcatcatattctgctagacagaagaattctcagtaacttccttgtgttgtgtgtattcaactgacagagttgaactttcatttagagagatcagatttgaaacactgtttttgtggaatttgcaagtggagatttcaagcgctttggggccaaaggcagaaaaggaaatatcttcgtataaaaagtagacagaatcattctcagaaactgctgcgtgatgtgtgcgttcaactctcagagtttaacttttcttttcattcagcggtttggaaacactctgtttgtaaagtctgcacgtggaaattttgaccacttagaggccttcgttggaaacgggtttttttcatgtaaggctagatagaagaattcccagtaacttccttgtgttgtgtacattcaactcacagatttgaacgttcccttagacagagcagatttgaaacactctttttgtgcaattggcaaatggagatttcaagcgctttaaggtcaatggcagaaaaggaaatatcttcgtttcaaaactagacagaatcattcccacaaactgcgttctgatgtgttcgttcaactcacagtagtttaacctttctgttcatagagcagttaggaaacactctgtttgtaaagtctgtaagtggatattctgacatcttgtggccttcgttggaaacgggatttcttcatattctgctagacagaagaattctcagtaacttccttgtgttgcgtgtattcaactcacagaggttgaacgatcctttacacagagcagacttgaaacactctttttgtggaatttgcaagtggagatttcagccgctttgaggtcaatatgtagaaaaggaaatatcttcgtagaaaaactagacagaaatgattctcagaaactcctttgtgatgtgtgtgttcaactcacagagtttaacctttcttttcatacagcagttaggaaacactctgtttgtaaattctgcaagtggatattttgaccgctttgaggccttcgttggaaacgggtttttttcatgtaaggctagacagaagaattctcagcaacttccttgtgttgtgtgtattcaactgacagagttgaactttcatttagagagagcagatttgaaacactgtttttgtggaatttgcaagtggagatttcaagcgctttggggccaaaggcagaaaaggaaatatcttcgtataaaaactagacagaatcattctcagaaactgctctgtcatgtgtgcgttcaactctcagagtttaacttttcttttcattcagcagtttggaaacactctgtttgtaaagtctgcacgtggatatttttaccacttagaggtcttcgttggaaacgggtttttttcatgtaaggctagacagaagaattcccagtaacttccttgtgttgtgtgcattcaactcacagagttgaacgttcccttagacagagcagatttgaaacactctatttgtgcaatttgcaagtgtagatttcaagcgctttaaggtcaacggcagaaaaaggaaatatcttcgtttcaaaactagacagaatgattctcagaaacttctttgtgatgtgtgcgttcaactcacagagtttaacctttcttttcatagagcagttaggaaacactctgtttgtaaagtctgcaagtggatatacagacctctttgaggccttcgttggaaacgggatttcttcatactatgctagacagaagaattctcagtaacttccttgtgttgtgtgtattcaactcacagagttgaactatcctttacacagagcagacttgaaacactcgttttgaggaatttgcaagtggagatttcagccgctttgaggtcaatggtagaaaaggaaatctcttcgtataaaaactagacagaatgattctcagaaactcctttgtgatgtgtgcgttcaactcacagagtttaacttttcttttcatagagcagttaggaaaaactctgtttgtaaagtctgcaagtggatattcagacctctttgaggccttcgttggaaacgggatttcttcatattctgctagacagaagaattcccagtaacttccttgtgttgtgtgtgttcaactcacagagttgaactttcatttacacagagcagatttgaaacactctttttgtggaatttgcaagtggagatgtcaagcgctttgaggccaaaggcagaaaaggaaatatcttcgtttcaaaactagacagaatcattctcagaaactgctgtgtgatgtgtgcgttcaactctcagagtttaacttttcttttcattcagcggtttggaaacactctgtttgtaaagtctgcacgtggaaattttgaccacttagaggccttcgttggaaacgggtttttttcatgtaaggctcgacagaagaattcccagtaacttccttgtgttgtgtgcattcaactcacagagttgaacgttcccttagacagagcagatttgaaacactctctttgtgcaatttgcaagtgtagatttcaagcgctttaaggtcaatggcagaaaagaaaatatcttcgtttcaaaacaagacagaatgattctcagaaactcctttgttatgtgtgcattcaactcacagagtttaccctttcttttcatagagcagttaggaaacactctgtttgtaaagtctgccagtggatattcagacatccttgaggctttcgttggaaacgggatttcttcatattctgccagaaagaagaattctcagtaacttccttgtgttgtgtttattcaactcacagagttgaatgatcctttacagagagcagacttgaaacactctttttgtggaatttgcaagtggagatttcagccgctttgaggtcaatggtagaaaggtaaatatcttcgtataaagactagacagaaatgattctcagaaacttctttgtgatgtgtgcgttcaactcacagagtttaacctttcttttcatagagcagttaggaaacactctgtttgtaaactctgcaagtggatattcagacctgtttgaggccttcgttggaaacgggatttcttcatactatgctagacagaagaattctcagtaacttccttgtgttgtgtgtattcaactgacggagttgaactatcatttagagagagcagatttgaaacactgtttttgtggaatttgcaagtggagatttcaagcgctttggggccaaaggcagaaaaggaaatatcttcgtataacaactagacagaatcattctcagaaactgctgcgtgatgtgtgcgttcaactctcagagtttaacttttctttttattcagcggtttggaaacactctgtttgtaaagtctgcacgtggatattttgaccacttagaggccttcgttggaaacgggtttttttcatgtaaggctagacagaagaattcccagtaacttccttgtgttgtgtgcattcaactcacagagttgaacgttcccttagacagagcagatttgaaacactctgtttgtgcaatttgcaagtgtagatttcaagcgctttaaggtcaatggcagaaaaggaaatatcttcgtttcaaaactagacagaatcattcccacaaactgcgttgtgatgtgttcgttcaactcacagagtttaacctttctgttcatagagcagttaggaaacactctgtttgtaaagtgtgtaagtggatattctgacatcttgtggccttcgttggaaacgggatttcttcatattctgctagacagaagaattctcagtaacttccttgtgttgtgtgtattcaactcacagagttgaacgatcctttacagagagcagacttgaaacactctttttgtggaatttgcaattggagatttcagccgctttgaggtcaatagtagaaaaggtaatatcttcgtagaaaaactagacagaatgattctcagaaacttctttgtgatgtgtgcgttgaactcacagagtttaaccttttttttcatagagcagttaggaaacactctgtttgtaaactctgcaagtggataatcagacctctttgaggccttcgttggaaacgggatttcttcatactatgctagacagaagaattctcagtaacttccttgtgttgtgtgttttcaactcacagagttcaacgatgctttacacagagtagacttgaaacactctttttgtgtaatttgcaagtggagatttcagccgctttgaggtcaatggtagaaaaggaaatatcttcgtataaaaactagacagagtgattctcagaaactcctttgtgatgtctgcgtttaactcacagagtataacctttcttttcatagagcagttaggaaacactctgtttgtaaagtctgcaagtggatattcagacctccttgaggccttcgttggaaacgggatttcttcatattatgctagacagaagaattctcagtaacttccttgtgttgtgtgtattcaactcacagagttgaaggatcctttacacagagcagactagaaacattctttttgtggaatttggaagtggagatttcagccgctttgaggtcaatggtagaataggaaatatcttcctatagaaactagacagaatgattctcagaaactcctttgtgatgtgtgcgttcaactcacagagtttaacctttcttttcatagagcagttaggaaacactctgattgtaaagtctgcaagtggatattcagacctccttgaggccttcgttggaaacgggatttcttcatattatgctagacagaagaattcccagtaacttccttgtgttgtgtgtgttcaactcacagagttgaactttcctttacacagagcagatttgaaacactctttttgtggaatttgcaagtggagatttcaagcgctttgaggccaaaggcagaaaaggaaatatcttcgtttcaaaactagacagaatcattctcagaaactgctctgtgatgtgtgcgttcaactctcagagtttaacttttcttttcattcagcagtttggaaacactctgtttgtaaagtctgcacgtggatattttgaccacttagaggccttcgttggaaacggtttttttcatgtaaggctagacagaagaattctcagtaacttccttgtgttgtgtgtattcaactcacagagttgaacgatcctttacacagagcagacttgtaacactctctttgtggaatttgcaagtggagatttcagccgctttgaagtcaaaggtagaaaaggaaatatcttcctataaaaactagacagaatcattcccacaaactgcgttgtgatgtgttcgttcaactcacagagtttaacctttctgttcatagagcagttaggaaacactctgtttgtaaagtctgtaagtggatattctgacattttttggccttcgttggaaatgggatttcttcatattctcctagacagaattctcagtaacttccttgtgttgtgtgtattcaactcacagagttgaacgatcctttgcacagagcagacttggaacactctttttgtggaatttgcaagtggagatttcagccgctttgaagtcaaaggtagaaaaggaaatatcttcctataaaaactagacagaatgattctcagaaacttctttgtgatgtgtgcgttcaactcacagagtttaacctttcttttcatagagcagttaggaaacactctgtttgtaaactctgcaagtggatattcagacctccttgaggccttcgttggaaacgggatttcttcatactgtgctagaccagaagaattctcagtaactttccttgtgttgtgtgtattcaactgacagagttgaactttcatttggagagagcagatttgaaacactgtttttgtggaatttgcaagtggagatttcaagcgctttggggccaaaggcagaaaaggaaatatcttcgtataaaaactagacagaaatcattctcagaaactgctctgcgatgtgtgcattcaactctcagtagtttaatttttcttttcattcagcagtttggaaacactctctttgtaaagtctgcacgtggatattttgaccacttagaggccttcgttggaaacgggttttattcttgtaaggctagacagaagaattcccaggaacttccttgtgttgtgtacattcaactcacagagttgaacgttcccttagacagagcagatttgaaacactctttttgtgcaattggcaagtggtgatttcagccgctttgtggtcaatggtagaaaaggaaatatcttcgtataaaaactagacagaatcattcccacaaactgcgttgtgatgtgttcgttcaactcacagagtttaacctttcttttcatagagcagttaggaaacagtctgtttgtcaattctgtaagtggatattctgacatcttgtggccttcgttggaaacgggatttcttcatatttggctagacagaagaattctcagtatcttccttgtgttgtgtgtattcaactcacagagttgaacgctcctttacacagagcagacttgaaacactctttttgtggaatttgcaagtggagatttaagccgctttgaggtcaatggtagaaaagggaatatcttcgtatagaaactagacagaatgattctcagaaactcctttgtgatgtgtgcgttcaactcacacagtttaacctttcttttcatagagcagttaggaaacactctgtttgtaaagtctgcaagtggatattcagacctccttgaggccttcgttggaaacgggatttattcatattatgctagacagaagaattcccagtaacttccttgtgttgtgtgtgttcaactcacagagttgaactttcatttacacagagcagatttgaaacactctttttgtggaatttgcaagtggagatttcaagcgctttgaggccagaggcagaaaaggaaatatcttcgtttcaaaactagacagaatgattctcagaaactgctgcgtgatgtgtgcgttcaactctcagagtttaacttttcttttcattcagcggtttggaaacactctgtttgtaaagtctgcacgtggatattttgaccacttagaggccttcgttggaaacgggtttttttcatgtaaggctagacagaagaattcccagtaacttccttgtgttgtgtacattctactcacagagttgaacgttcccttagacagagcagatttgaaacactctttttgtgcaattggcaagtggtgatttcaaccgctttgaggtcaatggtagaaaaggaaatatcttcgtataaaaactagacagaatgattctcagaaactcctttgtgatgtgtgcgttcaaatcacagagtttaacttttcttttcatagagcagttaggaaacactctgtttgtaaagtctgcaagtggatattcagacctctttgaggccttcgttggaaacggaatttcttcatattatgctagacagaagaattctcagtaacttccttgtgttgtgtgtattcaactcacagagttgaacgatcgtttacacagagcagacttgaaacattctttttgtggaatttgcaagtggagatttcagccgctttgaggtcaatggtagaataggaaatatcttcctatagaaactagacagaatgattctcagaaactcctttgtgatgtgtgtgttcaactcacagcagtttaacctttcttttcatagagcagttaggaaacgctctgtttgtaaagtctgcaagtggatattcagacctcgttgagaccttcgttggaaacgggatttcttcatattctgctagacagaagaattctcagaatctcccttgtgttgtgtgtattcaactcacagagttgaacgatcctttacacagagcagacttgaaacactctttttgtggaatttgcaagtggagatttcagccgctttgaggtccatggtagaaaaggaaatatcttcgtataaaaacaagacagaatggttctcagaaactcctttgtgatgtgtgcgttcaactcacagagtttaacttttcttttcatagagcagttaggaaacactctgtttgtaaagtctgcaagtggatattcagacctctttgaggccttcgttggaaacgggatttcttcatattctgctagacagaagaattcccagtaacttccttgtgttgtgtgtgttcaactcacagagttgaactttcatttacacagagcagatttgcaacactctttttgtggaatttgcaaatggagatttcaagcgctttgaggccaaaggcagaaaaggaaatatcttcgtttcaaaactagacagaatcattctcagaaacttctctgcgatgtgtgcgttcaactctcagagtttaacttttcttttcattcagcagtttggaaacactctctttgtaatgtctgcacgtggatattttgaccacttagaggccttcgttggaaacgggtttttttcctgtaaggctagatagaagaattcccagtaacttccttgtgttgtgtacattcaactcacagagttgaacgttcccttagacagagcagatttgaaacactctttttgtgcaattggcaagtggagatttcaagcgctttgaggtcaatggcagaaaaggaaatatcttcgtttcaaaactagacagaatgattctcagaaactcctttgtgatgtgtgcgttcaactcacagagtttaactttccttttcatagagcagttaggaaacactctgtttgtaaagtctgcaagtggatattcagacctctttgaggccttcgttggaaacgggatttcttcatattctgcttgacagaagaattctcagtaacttccttgtgttgtgtgtattcaagtcacagagttgaacgatcctttacacagagcagacttgaaacactctttttgtggaatttgcaagtggagatttcagccgctttgaggtcaatagtagaaaaggaaatatcttcgtagaaaaactagacagaatgattctcagaaattcctttgtgatgtgtgtgttcaactcacagagtttaacctttcttttcatagagcagttaggaaacactctgtttgtaaagtctgcaagtggatattcagacctctttgaggccttcgttggaaaagggatttcttcatgctctgctagacagaagaattctcagtaacttccttgtgttgtgtgtattcaactgacagagttgaactttcatttggagagagcagatttgaaacactgtttttgtggaatttgaaagtggagatttcaagcgctttggggccaaaggcagaaaaggaaatatcttcgtagaaaaactagacagaatcattctcagaaactgctctgtgatgtgtgcgttcaactctcagagtttaacttttcttttcattcagcagtttggaaacactctgtttgtaaagtctgcacgtggatattttgaccacttagaggccttcgttggaaacgggttttttttcatgtaaggctagacagaagaattcccagtaacttccttgtgttgtgtgcattcaactcacagagttgaacgttccttagacagagcagatttgaaacactctatttgtgcaatttgcaagtgtaggtttcaagcgctttaaggtcaatggcagaaaaggaaatatcttcgtttcaaaactagacagaatcattcccacaaactgcgttgtgatgtgttcgttcaactcacagagtttaacctttcttttcatagagcagttaggaaacagtctgtttgtaaattctgtaagtggatattctgacatcttgtggccttcgttggaaacgggatttcttcatattctgctagacggaagaattctcagtaacttccttgtgttgtgtgtattcaactcacagacttgaatgatcctttacacagaacagtcttgaaagactctttttgtggaatttgcaagtggagatttcagccgctttgaggtcaatggtagaataggaaatatcttcctatagaaactagacagaatgattctcagaaactcctttgtgatgtgtgcgttcaactcacagagtttaacttttcttttcatagagcagttaggaaacactctgtttgtaaagtctgcaagtggatattcagacctctttgtggccttcgtttgaaacgggatttcttcatattctgctagacagaagaattcccagtaacttccttgtgttgtgtgtgttcaactcacagagttgaactttcatttacacagagcagatttgaaacactctttttgtggaatttgcaagtggagatttcaagcgctttgaggccaaaggcagaaaaggaaatatcttcgtagaaaaactagacagaatcattctcagaaactgctctgcgatgtgtgcgttcaactctcagagtttaacttttgttttcattcagcagtttggaaacactctgtttgtgaagtctgcacgtggataacttgaccacttagaggccttcgttggaaacgggtttttttcatgtaaggctagacagaagaattcccagtaacttctttgtgttgtgtgcattcaactcacagagttgaacgttcccttagagagagcagatttgaaacactctatttgtgcaatttgcaagtgtagatttcaagcgctttaaggtcaatggcagaaaaggaaatatcttcgtttcaaaactagacagaatcattcccacaaactgcgttgtgatgtgttcgttcaactcacagagtttaacctttctgttcatagagcagttaggaaacactctgtttgtaaagtctgtaattggatattctgacatcttgaggccttcgttggaaacgggatttcttcatattctgctagacagaagaattctcagtaacttccttgtgttgtgtgtattcaactcacagagttgaacgatcctttacacagagcggacttgaaacactctttttgtagaatttgcaagtggagatttcagccgcgttgaggtcaatggtagaaaaggaaatatcttcgtataaaaactagacagaatgattctcagaaactcctttgtgatgtgtgtgttcaactcacagagtttaacctttcttttcatagagcagttaggaaacactgtgtttgtaaagtctgcaagtggatattcagacctctttgaggccttcgttggaaacgggtttttttcatataaggctagacagaagaattctcagtaacttccttgtgttgtgtgttttcaactgacagagttgaactttcatttagagagagcagatttgtaacactgtttttgtggaatttgcaagtggagatttcaagcgctttggggccaaaggcagaaaaggaaatatcttcgtataaaaactagacagaatcattctcagaaactgctctgcgatgtgtgcgttcaactctcagagtttaacttttcttttcattcagcagtttggaaacactctgtttgtaaagactgcacgtggataatttcaccacttagaggtcttcgttggaaacgggtttttttcatgtaaggatagacagaagaattcccagtaacttccttgtgttgtgtacattcaactcacagagttgaacgttcccttagacagagcagatttgaaacactctttttgtgcaattggcaagtggagatttcaagcgctttatggtcaatggcagaaaaggaaatatcttcgtttcaaaactagacagaatcattcccacaaactgcgttgtgatgtgttctttcatctcacagagtttaacctttcttttcatagagcagttaggaaacactatgtttgtaaattctgtaagtggatattctgacatcttgtggccttcgttggaaacgggatttcttcatattctgctagacagaagaattctcagtaacttccttgtgttgtgtgtattcaactcacagagttgaacgatcctttacacagagcagacttgaaacactctttttgtggaatttgcaagtggagatttcatccactttgaggtcaatagtagaaaaggaaatatcttcgtagaaaaactagacagaatgattctcagaaactcctttgtgatgtgtgcgttcaactcacagagtttaacctttcttttcatagagcagttaggaaacactctgtttgtaaagtctgcaagtggatattcagacctctttgaagccttcgttggaaacgggatttcttcatattatgctagacagaataattctcagtaacttccttgtgttgtgtgtattcaactcacagagttgaactatcctttacagagagcagacttgaaacactctttttgtggaatttggaagtggagatttcagccgctttgaggtcaaaggtagaataggaaatatcttcctacagaaaatagacagaatcattctcagaaactgctctgcgatgtgtgcgttcaactctcagagtttaacttttcttttcattcagcagtgtggaaacactgtgtttgtaaagtctgcacggggatattttgaccacttacaggccttcgttggaaacgggtttttttcctgtaaggctagacagaagaattcccagtaacttccttgtgttgtgcgcattcaactcacagagttgaacgttcccttagacagagcagatttgaaagagcctatttgtgcaatttgcaagtgtacatttcaagcgctttaaggtcaacggcagaaaaggaaatatcttcctttcaaaactagacagaatgattctcagaaactcctttgtgatgtgtgcgttcaactcacagagtttaacctttcttttcatagagcagttaggaaacactctgtttgtaaagtctgcaagtagatattcagacatccttgaggctttcgttggaaacgggatttcttcatattctgctagaaagaagaattctcagtaacttctttgtgttgtgtgtattcaactcacagagttgaacgatcctttacacagagcagacttgaaacactccttttgtggaatttgcaagtggagatttcagccgctttgaggtcaatggtagaataggaaatatcttcctatagaaactagacagaatgattctcagaaactcctttgtgatgtgtgtgttcacctcacagagtttaacctttcttttcatagagcagttagtaaacactctgtttataaagtctgcaagtggatattccgacccctttgaggccttcgttggaaacgggatttcttcatattatgctagacagaagaattctcagtaacttccttgtgttgtgtgtattcaactgacagagttgaactttcatttagagagagcagattagaaacactgtttttgtggaatttgcaagtgcagatttcaagcgctttgtggccaaaggcagaaaaggaaatatcttcgtatgaaaactagccagaatcattctcagcaaactgctctgcgatgtgtgcgttcaactctcagagtttaacttttcttttcattcagcagtttggaaacactctgtttgtaaagtctgcacgtggatattttgaccacttagaggccttcgttggaaacgggtttttttcctgtaaggctagacagaagaattcccagtaacttccttgtgttgtgtacattcaactcacagagttgaacgttcccttagacagagcagatgtgaaacactctttttgtgcaattggcaagtggagatttcaagcgctttaaggtcaatggcagaaaaggaaatatctttgtttcaaaactagacagaatcattcccacaaactgcgttgtgatgtgttcgttcaactcacacagtttaacctttcttttcatagagcagttaggaaacagtctgtttgtaaattctgtaagtggatattctgacatcttgtggccttcgttggaaacgggatttcttcatattctgctagacagaagaattctcagtaacttccttgtgttgtgtgtattcaactcacagagttgaacgatcgtttacacagagcagacttgaaacactctttttgtggaatttgcaagtggagatttcagccgctttgaggtcaatggtagaaaaggaaactatcttcatataaagactagacagaatgattctcagaaactcctttgtgatgtgtgcgttcaactcacagagtttaacctttcttttcatagagcagttaggaaacactctgtttgtaaagtctgcaagtggatattcagacctctttgaggccttcgttggaaacgggtttttttcatatcaggctagacagaagaattcccagtaacttccttgtgttgtgtgtgttcaactcacagagttgaactttcatttacacagagcagatttgaaacactctttttgtggaatgtgcaagtggagatttcaagcgctttgaggccaaaggcagaaaaggaaatatcttcgtataaaaactagacagaatcattctcagaaactgctgcgtgatgtgtgcgttcaactctcagagtttaacttttcttttcattcagcggtttggaaacactctgtttgtaaagtctgcacgtagaaattttgaccacttagaggccttcgttggaaacgggtttttttcatgtaaggctagacagaagaattcccagtaacttccttgtgttgtgtgcattcaactcacagagttgaacgttcccttagacagagcagatttgaaacactctatttgtgcaatttgcaattgtagatttcaagcgctttaaggtcaacggcagaaaaggaaatatcttcgtttcaaaactagacagaatgattgtcataaactcctttgtgatgtgtgcgttcaacacacagagtttaacctttctgttcatagagcagttaggaaacattctgtttgtaaagtctgtaagtggatattctgacatcttgtggccttcgttggaaacgggatttcttcatattctgctagacagaagaattctcagtaacttccgcgtgttgtgtgtattcaactcacagagttgaacgatcctttacacagagcagacttgtaacactctttttgtggaatttgcaagtggagatttcagccgctttgaagtcaaaggtagaaaaggaaatatcttcctataaaaactagacagaatgattctcagaaactcctttgttatgtgtgcgttcaactcacagagtttaacctttcttttcatagagcagttaggaaacactctgtatgtaaagtctgcaagtggatattgagacctctttgaggccttcgttggaaacgggaattcttcatattatgctagacagaagaattcccagtaacttccttgtgttgtgtgtgttcaactcacagagttgaacattcatttacccagagcagatttgaaacactctttttgtggaatttgcaagtggagatttcaagcgctttgaggccaaaggcagaaaaggaaatatcttcgtttcaaaactagacagaatcattatcagaaactgctgcgtgatgtgtgcgttcaactctcagaatttaagttttcttttcattcagcggtttggaaacactctgtttgtaaagtctgcacgtggatatattgaccacttagaggccttcgttggaaacgggtttttttcatgtaaggctagacagaagaattcccagtaacttccttgtgttgtgtgcattcaactcacagagttgaacgttcccttagacagagcagatttgaaacactctatttgtgcaatttgcaagtgtagatttcaagcgctttaaggtcaacggcagaaaaggaaatatcttcgtttcaaaactaggcagaatcattcccacaaactgcgttgtgatgtggtcgttcaactcacagagtttaacttttcttttcatagagcagttaggaaacacctctgtttgtaaagtctgtaagtggatattctgacatcttgtggccttcgttggaaacgggatttcttcatattctgctagacagaagaattcttagaatcttccttgtgttgtgtgtattcaactcacacagttgaacgatggtttacacagagcagatttgaaacactctttttgtggaatttgcaagtggagatttcagccgctttgaggtcaatggtagaaaaggaaatatcttcgtataaaaactagacagaatgattctcagaaactcctttgtgatgtgtgcgttcaactcacagagtttaacctttcttttcatagagcagttaggaaacactctgtttgtaaactctgcaagtggatattcagacctctttgaggccttcgttggaaacgggatatcttcatactgtgctagacagaagaattcccagtaacttccttgcgttgtgtgtgttcaactcacagagttcaactttcatttacacagagcagatttgaaacactgtttttgtggaatttgcaagtggagatttcaagcgctttgaggccaaaggcagaaaaggaaatatcttcgtttcaaaaccagacagaatgattctcagaaactcctttgtgatgtgtgcgttcaactcacagagtttaacctttcttttcatagagcacttaggaaacactctgtttgtaaagtctgcaagtggatattcagacctctttgaggccttcgttggaaacgggtttttttcatataaggctagacagaagaattcccagtaacttccttgtgttgtgtacattcaactcacagagttgaaagttcccttagacagagcagatttgaaacactctttttgtgcaattggcaagtggagattacaagcactttaaggtcaatggcagaaaaggaaatatcttcgtttcaaaactagacagaatcattcccacaaactgcgttgtgatgtgttcgttcaactcacagtagtttaacctttccgttcatagagcagttaggaaacacactgtttgtaaagtctgtaagtggatattctgacatcttgtggccttcgttggaaacgggatttcttcatattctgctagacagaagaattctcagtaacttccgcgtgttgtgtgtattcaactcacagagttgaacgatcctttacacagagcagacttgaaacactctttttgtggaatttgcaagtggagatttcagcctctttgaagtcaatggtagaaaaggaaatatcttcctataaaaactagacagaatgattctcagaaactcctttgtgatgtgtgcgttcaactcacagagttcaacttttcttttcatagagcagttaggaaacactctgtttgtaaagtctgcaagtggatattcagacctctttgaggccttcgttggaaacgggatttcttcatattctgctagacagaagaattcctagtaacttccttgttttgtgtgtgttcaactcacagagttgaactttgatttacacagagcagatttgaatcactctttttgtggaatttgcaagtggagatttcaagcgctttgaggccaaaggcagaaaaggaaatatcttcgtataaaaactagacagagtaatcattctcagaaactgctgcgtgatgtgtgcgttcaactctcacagtttaacttttcttttcattcagcggtttggaaacactctgtttgtaaagtctgcacgtggatattttgaccacttagaggccttcgttagaaactggtttttttcatgtaaggctagacagaagaattcccagtaacttcccttgtgttgtgtgcattcaactcacagagttgaacgttcccttagacagagcagatttgaaacactctatttgtgcaatttgcaagtgtagatttcaagcgctttaaggtcaacggcagaaaaggaaatatcttcgtttcaaaactagacagaatcattcccacaaactgcgttgtgatgtgttcgttcaactcacagagtttaacctttctgttcatatagcagttaggaaacactctcaaaagtctgtaagtggatattctgacatcttgtggccttcgttggaaacgggatttcttcatattctgctagacagaagaattctcagtaacttccttgtgttgggtgtattcaactcacagagttgaaggatcctttacagagagcaggcttgaaacactctttttgtcgaatttgcaagtggagatttcagccgctttgaggtcaatggtagaataggaaatatcttcttatagaaactagacagaatgattctcagaaactcctttgtgatgtgtgcgttcaactcacagagtttaacctttcttttcatagagcagttaggaaacactctgtttgtaaagtctgcaagtggatattcagacctccttgaggccttcgttggaaacaggtttttttcatataaggctagacagaagaattctcagtaacttccttgtgttgtgtgtattcaactgacagagttgaactttcatttagagagagcagatttgaaacactgtttttgtggaatttgcaagtggagatttcaagcgctttagggccaaaggcagaaaaggaaatatcttcgtataaaaactagacagaaatgattctcagaaactcctttgtgatgtgtgagttcaactcacagagtttatcctttcttttcatagagcagttaggaaacactctgtttgtaaagtctgcaagtggatattcagacctctttgaggccttcgttggaaacgggatttcttcatattctgctagacagaagaattcccagtaacttccttgtgttgtgtgcattcaactcacagagttgaacattcccttgacagagcagatttgaaacactctatttgtgcaatttgcaagtgtagatttcaagcgctttaaggtcaatggcagaaaagggaatatcttcgtttcaaaactagacagaatgattctgagaaactcctttgtgatgtgtgcgttcaactgacagagtttaacctttcttttcatagagcagttaggaaacactctgtttgtaaagtctgcaagtggatattcagacatccttgaggctttcgttggaaacgggatttcttcatattctgctagaaagaagaattctcagtaacttccttgtgttgtgtgtattcaactcacagagttgaatgatcctttacacagaacagtcttgaaacactctttttgtggaatttgcaagtggagatttcagccgctttgaggtcaatggtagaataggaaatatcttcatatagaaactagacagaatgattctcagtaactcctttgtgatgtgtgcgttcaactcacagagtttaacctttcttttcatagagcagttaggaaacactctgtttgtaaagtctccaagtggatattcagacctctttgaggccttcgttggaaacgggtttttttcatataaggctagacagaagaattcccagtaacttccttgtgttgtgtgtgttcagctcacagagttgaactttcatttacacagagcagatttgaaacactctttttgtggaatttgcaggtggagatttcaagcgctttgaggccaaaggcagaaaaggaaatatcttcgtataaaaactagacagaagcattctcagaaactgctctgcgatgtgtgcgttcaactctcagagtttaacttttcttttcattcagcagtttggaaacactctgtttgtaaagtctgcacgtggataacttgaccacttagaggccttcgttggaaacgggtttttttcatgtaaggctagacagaagaattcccagtaacttccttgtgttgtgtacattccactcacagagttgaacgttcccttagacagagcagatgtgaaacactctttttgtgcaattggcaagtggagatttcaagcgctttaaggtcaaaggcagaaaaggaaatatcttcgtttcaaaactagacagaatcattcccacaaactgcgttgtgatgtgttcgttcaactcacagggattaacctttcttttcatagagcagttaggaaacagtctgtttgtcaattctgtaagtggatattctgacatcttgtggccttcgttggaaacgggatttcttcatattctgctagacagaagagttctcagaaacttccttgtgttgtgtgtattcaactcacagagttgaactatcgtttacacagaacagacttgagacactctttttgtggaatttgtaagtggagatttcagccgctttgaggtcaatggtagaaaaggaaatatcttcatataaaaactagacagaatgattctcagaaactcctttgtgatgtgtgcgttcaactcacagagtttaacctttcttttcatagagcagttaggaaacactctgtttgtaaagtctgcaagtggatattcagacatctttgaggctttcgttggaaacaggatttcttcatattctgctagacagaagaattccagtaacttccttgtgttgtgtgtgttcaactcacagatttgaactttcatttacacagagcagatttgaaacactctttttgtggaatttgcaaatggagatttcaagcgctttgaggccaaaggcagaaaaggaaatatcttcgtataaaaactagacagaatcattctcagaaactgctctgcgatgtgtgcgttcaactctcagagtttaactttgcttttcattcagcagtttggaaacactctgtttgtaaagtctacacgtggatattttgaccacttagaggccttcgttggaaacgggtttctttcctataaggctagacagaagagttctcagtaacttccttgtgttgtgtgtattcaactcacacagttgaacgatcctttatagagagcagacttgtaacactctttttgtggaatttgcaagtggagatttcagccgctttgaagtcaaagtagaaaaggaaatatcttcctataaaaactagacagaatcattcccacaaactgcgttgtgatgtgttcgttcatctcacagagtttaacctttcttttcatagagcagttaggaaacactctgtttgtaaattctgtaagtggatattctgacatcatgtggccttcgttggaaacgggatttcttcatattctgctagacagaagaattctcagtaacttccttgtgttgtgtgtattcaacccacagagttgaacgatcctttacacagagcagacttgaaacactctttttgtggaatttgcaagtggagatttcagccgctttgaggtcaatggtagaaaaggaaatatcttcgtataaagactagacagaatgattctcagaaactcctttgtgatgtgtgcgttcaactcacagagtttaacctttcttttcatagagcagttaggaaacactctgtgtgtaaagtctgcaagtggatattcagacctccttgaggccttcgttggaaacgagatttcttcataatatgctagacagaagaattctcagtaacttccttgtgttgtgtgtattcaactcacagagttgaaccatcctttacagagagcagacttgaaacactctttttgtggaatttgcaagtggagatttcagccgctttgaggtcaatggtagaataggaaatatcttcctatagaaactagacagaatgattctcagaaactcctttgtgatgtgtgcattcaactcacagagtttaacttttcttttcatagagccgttaggaaacactctgtttgtaaagtctgcaagtggatattcagacctctttgaggccttcgttggaaacgggatttcttcatattatgctagacagaagaattcccggtaacttccttgtgttgtgtgtgttcaactcacagagttgaactttgatttacacagagcagatttgaaacactctttttgtggaatttgcaagtggagatttcaagcgctttgaggccaaaggcagaaaaggaaatatcttcgtataaaaactagacagaatcattctcagaaactgctctgcgatgtgtgcgttcaactctcagagtttaacttttcttttcattcagcagtttggaaacactctgtttgtaaagtctgcacgtggatattttgaccacttagaggccttcgttggaaacgggtttttttcctgtaaggctagacagaagaattcccagtaacttccttgtgttgtgtgcattcaactcacagagttgaacgttcccttagacagagcagatttgaaacactctatttgtgcaatttgcaagtgtagttttcaagctctttaaggtcaacgacagaaaaggaaatatcttggtttcaaaactagacagaatcattcccacaaactgcgttgtgatgtgttcgttcaactcacagagtttaacctttctgttcatagagcagttaggaaacactctgtttgtaaagtctgtaagtggatattctgacatcttgtggccttcgttggaaacgggatttcttcctattctgctagacagaagaattctcagtaacttccttgtgttgtgtgtattcaactaacagagttgaacgatcctttacacagagcagacttgaaacactctttttgtggaatttgcaagtggagatttcagccgctttgaggtcaatggtagaaaaggaaactatcttcatataaagactagacagaatgattctcagaaactcctttgagatgtgtgtgttcaactcacagagtttaacctttcttttcatagagcagttaggaatcactctgtttgtaaagtctgcaagtggatattcagacctctttgaggccatcgctggaaacgggtttttttcatataaggctagacagaagaattcccaataacttccttgtgttgtgtgtgttcaactcacagagttgaactttcatttacacagagcagatttgaaacactctttttgtggaatttgcaagtggagatttcaagcgctttgaggccaaaggcagaaaaggaaataccttcgtataaaaactagacagaatgattctcagaaactcctttgtgatgtgtgcgttcaactcacagagtttaacctttcttttcattcggcggtttggaaacactctgtttgtaaagtctgcacgtggatattcagacctctttgaggccttcgttggaaacgggtttttttcatgtaaggctagacagaagaattcccagtaacttccttgtgttgtgtgcattcaactcacagagttgaacgttcccttagacagagcagatttgaaacactctatttgtgcaatttgcaaatgtagatttcaagcgctttaaggtcaacggcagaaaaggaaatatcttcgtttcaaaactagacagaatcattcccacaaactgcgttgtgatgtgttcgttcaactcacagagtttaacctttcttttcatagagcagttaggaaacagtctgtttgtcaattctgtaagtggatattctgacatcttgtggccttcgttggaaacgggatttcttcatattctcctagacagaagaattctcagtaacttccttgtgttgtgtgtattcaactcacagagttgaacgatcctttacacagagcagacttgaaacactcgttttgtggaatttgcaagtggagatttcagccgctttgaagtcaatggtagaaaaggaaatatcttcgtataaaaactagacagaaagattctcataaactcctttgtgatgtgtgcgttcaactcacagagtttaacctttcttttcatagagcagttaggaaacactctgtttgtaaagtctgcaagtggatattcagacctctttgaggccttcgttggaaacgggatttcttcatattatgctagacgggaagaattctcagtaacttccttgtgttgtgtgtattcaactgacagagttgaactttcatttagagagagcagatttgaaacactgtttttgtggaatttgcaagtggagatttcaagcgctttggggccaaaggcagtaaaggaaatatcttcgtataaaaactagacagaatcattctcagaaactgctctgcgatgtgtgcgttcaactctcagagtttaacttttcttttcattcagcagtttggaaacactctgtttgtaaagtctgcacgtggatattttgaccacttagaggccttcgttggaaacgtgtttttttcctgtaaggctagacagaagaattcccagtaacttccttgtgttgtgtacattcaactcacagagttgaacgttcccttagacagagcagatttgaaacactctttttgtgcaattggcaagtggaaatttcaagcgctttgaggtcaatggcagaaaaggaaatatcttcgtttcaaaactagacagaaatcattcccacaaactgcgttgtgatgtgttcgttcaactcacagaagtttaacctttcttttcatagagcagttaggaaacactctgttggtaaaatctgtaagtggatattctgacatcttgtggccttcgttggaaacgggatttcttcatattctgctagacagaagaattctcagtaacttccttgtgttgtgtgtattgaactcgcagagttgaacgatcctttacacagagcagacttgaaacactctttttgtggaatttgcaagtggagatttcagccgctttgaggtcaatagtagaaaaggtaatatcttcgtagaaaaactagacagaatgattctcagaaactcctttgtgatgtgtgcgttcaactcacagagtttgacctttcttttcacagagcagttaggaaacactctgtttgtaaagtctgcaagtggatattcagacctctttgaggccatagttggaaacgggatttcttcatattctgctagacagaagaattctcagtaacttccttgtgttgtgtgtattcaactgacagagttgaactttcatttagagagagcagatttgaaacactgtttttgtggaatttgcaagtggagatttcaagcactttggggccaaaggcagaaaaggaaatatcttcgtataaaaactagacagaatcattctcagaaactgctctgcgatgtgtgcgttcaactctcagagtttaacttttcttttcattcagcagtttgcaaacactctgtttgtaaagtctgcacgtggatattttgaccacttagaggccttcgttggaaacgggtttttttcctgtaaggctagacagtagaattcccagtaacttccttgcgttgtgtacattcaactcacagagttgaacgttcccttagacagagcagatttgaaacactctttttgtgcaattggcaagtggagatttcaagcgctttaaggtcaatggcagaaaaggaaatatcttcgtttcaaaactagacagaatcattcccacaaactgcgttgtgatgtgttcgttcaactcacagtagtttaacctttctgttcatagagctgttaggaaacactctgtttgtaaagtctgtaagtggatattctgacatcttgtggccttcgttggaaacgggatttcttcatattctgctagacagaagaattctcagtaacttccttgtgttgtgtgtattcaactcacagagttgaacgatcctttacacagagcatacttgaaacactctttttgtggaatttgcaagtggagatttcagccgctttgatgtcaatggtagaaaaggaaataacttcgtataaagactagacagaatgattctcagaaactcctttgtgatgtgtgcgttcaactcacagagtttaacctttcttttcatagagcagttaggaaacactgtgtttgtaaagtctgcaagtggatattcagacctctttgaggccttcgttggaaacgggtttttttcatataaggctagacagaagaattctcagtaacttgcttttgttgtgtgtattcaactgacagagttgaactttcatttagacagagcagatttgaaactctctttttctggaatttgcaagtggagatttcaagcgctttgaggccaaaggcagaaaaggatatatcttcgtataaaaactagacagaatcattctcagaaactgctctgcgatgtgtgccttcaactctcagagtttaacttttcttttcattcagcagtttggaaacactctgtttgtaaagtctgcacgtggataatttgaccacttagaggccttcgttggaaacgggtttttttcatgtaaggctagacagaagaattcccaataacttccttgtgttgtgtgcattcaactcacagagttgaacgttcccttagacagagcagatttgaaacactctatttgtgcaatttgcaagtgtagatttcaagcgctttaaggtcaatggcagaaaaggaaatatcttcgtttcaaaactagacagaatgattctcagaaactcctctgtgatgtgtgcgttcaactcacagagtttaacttttcttttcatagagcagttaggaaacactctatttgtaaagtctgcaaggggatattcagacctctttgaggccttcgttggaaacgggatttcttcatattctgctagacagaagaattctcagtaacttccttgtgttgtgtgtattcaactcacagagttgaacgatcctttacacagagcagacttgaaacactctttttgtggaatttgcaagtggagatttcagccgctttgaggtcaatggtagaaaaggaaatatcttcgtatagaaacaagacagaatgattctcagaaactcctttgagatgtgtgcgctcaactcacagagtttaacctttcttttcatagagcagttaggaaacactctgtttgtaaagtctgcaagtggatattcagacctctttgaggccttcgttggaaacgggtttttttcaaataaggctagacagaagaattctcagtaacttccctgtgttgtgtgtattcaactgacagagtcgaactttcatttagagagagcagatttgtaacattgtttttgtggaatttgcaagtggagatttcaagcgctttggggccaaaggcagaaaatgaaatatcttcgtataaaaactagacagaatcattctcagaaactgctctgcgatgtgtgcgttcaactctcagagtttaacttttcttttcattcagcagtttggaaacactctgtttgtaaagtctgcacgtggatattttgaccacttagaggccttcgttggaaacgggtttttttgcctgtaaggctagacagaaagaattcccagtaacttccttgtgttgtgtacattcaactcacggagttgaacgttcccttagacagagcagatttgaaacactctttttgtgcaattggcaaatggagatttcaagcgctttaaggtcaatggcagaaaaggaaatatcttcgtttcaaaactagacagaatgattctcagaaactcctttgtgatgtgtgcgttcaactcacagagtttaacctttcttttcatagagcagttgggaaacactctgtttgtaaagtctgcaagtggatattcagacatccttgaggctttcgttggaaaagggatttcttcatattctgctagacagaagaattctcagtaacttccttgtgttgtgtgtattcaactcacacagttgaacgatcctttacacagagcagacttgaaacactctttttgtggaatttgcaagtggagatttcagccgctttgaggtcaatggtagaataggaaatatcttcctatagaaactagacagaaagattctcagaaactcctttgtgatgtgtgcgttcaactcacagagtttaacctttcttttcatagagcagttaggaaacactctgtttgtaaagtctgcaagtggatattcagacctctttgaggccttcgttggaaacgggtttttttcatataaggctagacagaagaattctcagtaacttccttgtgttgtgtgtattcaactgacagagttgaactttcatttagagagagcagatttgaaacactgtttttgtggaatttgcaagtggagatttcaagcgctttgggaccaaaggcagaaaaggaaatatcttcgtatataaactagacagaatcattctcagaaactgttctgcgatgtgtgcgttcaactctcagagtttaacttttcttttcattcagcagtttggaaacactctgtttgtaaagtctgcacgtggatattttgaccacttagaggccttcgttggaaacgggtttttttcctgtaaggctagacagaagaattcccagtaacttccttgtgttgtgtacattcaactcacagagttgaacgttcccttagacagagcagatttgaaacactctttttgtgcaattggcaagtggtgatttcagccgctttgaggtcaatggtagaaaaggaaatatcttcgtataaaaactagacagaatcattcccacaaactgcgttgtgatgtgttcgttcaactcacagagtttaacctttcttttcctagagcagttaggaaacagtctgtttgtaaattctgtaagtggatattctgacatcttgtggccttcgttggaaacgggatttcttcatattctgctagacagaagaattctcagtaactttccttgtgttgtgtgtattcaactcacagatttgaacgatcctttacacagagcagacttgtaacactctttttgtggaattcgcaagtggagatttcagcagctttgaagtcaaaggtagaaaaggaaatatcttcctataaaaactagacagaatgattctcagaaactcctttgtgatgtgtgtgttcaactcacagagtttaacttttcttttcctagagcagttagtaaacactctgtttaaaaagtctgcaagtggatattcagacccctttgaggccttcgttggaaacgggatttcttcatattatggtagacagaagaattctcagtaacttccttgtgttgtgtgtattcaactcacagagttgaacgatccttttcacagagcagacttgaaacactctttttgtggaatttgcaagtggagatttcagccgctttgaggtcaatggtagaaaagggaatatcttcgtatagaaactagacagaatcattctcagaaactgctctgcgatgtgtacgttgaactctcagagtttaacttttcttttcattcagcagtttggaaacactctgtttgtaatgtctgcacgtggataatttgaccacttagaggccttcgttggaaacgggtttttttcatgtaaggctagacagaagaattctcagaaacttccttgtgttgtgtgtactcaactcacagagttgaacgatcctttacacagagcagacttgaaacactctttttgtggaatttgcaagtgtagatttcaagcgctttaaggtcaatggcagaaaaggaaatatcttcgtttcaaaactagacagaatcattcccacaaactgcgttgtgatgtgttcgttcaactcacagaatttaacctttctgttcatagagcagttaggaaacactctgtttgtaaagtctgtaagtggatattctgacgtcttgtggccttcgttggaaacgggatttcttcatattctgctggacagaagaattctcagtaacttccttgtgttgtgtgtattcaactcacagagttgaacgatcctttacagagagcagacttgaaacactctttttgtggaatttgcaagtggagatttcagcctctttgaggtcaatggtagaataggaaatatcttcctatagaaaccagacagaatgattctcagaaactcctttgtgatgtgtgcgttcaactcacagagtttaacctttcttttcatagggcagttaggaaacactctgtttgtaaagtctgcaagtggatattcagacatccttgaggctttcgttggaaacgggatttcttcatattctgctagaaagaagaattcccagtaacttccttgtgttgtctgtgttcaactcacagagttgaactttcatttacacagagcagatttgaaacactctttttgtggaatttgcaaatggagatttcaagcgctttgaggccaaaggcagaaaaggaaatatctttgtataaaaactagacagaatcattctcagaaactgctctgtgatgtgtgcgttcaactctcagagtttaacttttcttttcattcagcagtttggaaacactctgtttgtaaagtctgcacgtggataatttgaccacttagaggccttcgttggaaacgggtttttttcatgtaaggctagacagaagaattctcagtaacttcccttgtgttgtgtgtattcaactcacagagttgaacgatcctttacacagagcagacttgtaacactctttttgtggaatttgcaagtggagatttcagccgctttgaagtcaaaggtagaaaaggaaatatcttcctattaaaactagacagaatgattctcagaaaatcatttgtgatgtgtgcgttcaactcacagagtttaacttttcttctcatagagcagttaggaaacactctgtttgtaaagtctgcaagtggatattcagacctctttgaggccttcgttggaaacgggatttcttcatattctgctagacagaataattcccagtaacttccttgtgttgtgtgtattcaactcacagagttgaatgatcctttacacagagcagacttgaaacactctttttgtggaatttgcaagtggagatttcagccgctttgaggtcaatggtagaaaagtaaatatcttcgtataaagactagacagaatgattctcagaaactcctttgtgatgtgtgcgttcaactcacagagtttaacatttcttgtcatagagcagttaggaaacactctgtttgtaaagtctgcaagtggatattcagacctccttgaggccttcgttggaaacgagatttcttcatattatgctagacagaagaattctcagtaacttcccttgtgttgtgtgtattcaactgacagatttgaactttcatttagagagagcagatttgaaacactgtttttgtggaatttgcaagtggagatttcaagcgctttggggccaaaggcagaaaaggaaatatcttcgtataaaaactagacagaatcattctcagaaactgctgcgtgatgtgtgcgttcaactctcagagtttaacttttcttttcattcagcggtttggaaacactctgttcgtaaagtctgcacgtggatattttgaccacttaggggccttcgttggaaacgggtttttttcatgttaggctagacagaagaattcccagtaacttccttgtgttgtgtacattcaactcacagagttgaacgttcccttagacagagcagatttgaaacactctttttgtgcaattggcaaatggtgatttcaagcgctttaaggtcaatggcagaaaaggaaatatcttcgtttcaaaactagacagaatcattcccacaaactgcgttgtgatgtgttcgttcaactcacagagtttaacctttctgttcatagagcagttaggaaacactctgtttgtaaagtccgtaagtggatattctgacatcttgtggccatctttggaaacgggatttcttcatagtctgctagacagaagagttctcagtaacttccttgtgttgtgtgtattcaactcacacagttgaacgatcctttacagagagcagacttgtaacactctttttgtggaatttgcaagtggagatttcagccgctttgaagtcaaagtagaaaaggaaatatcttcctataaaaacaagacagaatgattctcagaaactcctttgtgatgtgtgagttcaactcacagagtttaacctttcttttcatagagcagttaggaaacactctgtttgtaaagtctgcaagtggatattcagacctctttgaggccttcgttggaaacgggtttttttcatataaggctagacagaagaattcccagtaacttccttgtgttgtgtgtgttcaactcacaaagttgaactttcatttacacagagcagatttgaaacactctttttgtggaatttgcaaatggagatttcaagcgctttgaggccaaaggcagaaaaggaaatatcttcgtataaaaactagacagaatcattctcagaaactgctctgcgatgtgtgcgttcaactctcagagtttaacttttcttttcattcagcagtttggaaacactctgtttgtaaagtctgcacgtggataatttgaccacttggaggccttcgttggaaacggatttttttcatgtaaggctagacagaagaattcccagtaacttccttgtgttgtgtgtgttcaactcacagagttgaactttcatttacacagagcagatttgaaacactctttttgtggaatttgcaagtggagatttcaagcgctttaaggtcaatggcagaaaaggaaatatcttcgtttcaaaactagacagaatcattcccacaaactgcgttgtgatgtgttcgttcaactaacagagtttaacctttctgttcatagagcagttaggaaacactctgtttgtaaagtctgtaagtggatattctgacatcttgtggccttcgttggaaacgggatttcttcatattctgctagacagaagaattctcagaaacttccttgtgttgtgtgtattcaactcacagagttgaacgatcgtttacacagagcagacttgagacactctttttgtagaatttgtaagtggagatttcagccgctttgaggtcaatggtagaaaaggaaatatcttcatataaaaactagacagaatgattctcagaaactcctttgtgatgtgtgtgttcaactcacagagtttaacctttcttttcatagagcagttagtaaacactctgtttataaagtctgcaagtggatattcagaccccttggaggccttcgttggaaacgggatttcttcatattatgctacacagaagaattcccggtaacttctttgtgttgtgtgtgttcaactcacacagttgaactttcatttacacagagcagatttgaaacactctttttgtggaatttgcaagtggagatttcaagcgctttgaggccaaaggcagaaaaggaaatatcttcgtttcaaaactagacagaatcattctcagaaactgctgcgtgatgtgtgcgttcaactctcagagtttaacttttcttttcattcagcggtttggaaacactctgtttgtaaagtctgtgcgtggatattttgaccacttagaggccttcgttggaaacgggtttttttcatgtaaggctagacagaagaattcccactaacttccttgtgttgtgtgcattcaactcacagacttgaacgttcccttagacagagcagatttgaaacactctatttgtgcaatttgcaagtgtagatttcaagcgctttaaggtcaatggcagaaaaggaaatatcttcgtttcaaaactagacagaatgattctcagaaacttctttgtgatgtgtgcgttcaactcacagagtttaacctttcttttcatagagcagttaggaaacactctgtttgtaaactctgcaagtggatgttcagacctgtttgaggccttcgttggaaacgggatttcttcatactattctagacagaagaattctcagtaacttccttgtgttgtgtgtattcaactcatagagttgaacgatcctttacacagagcagacttgtgacactctttttgtggaatttgcaagtggagatttcacccgctttgacgtcaaaggtagaaaaggaaatatcttcctataaaaactagacagaatgattctcagaaacttctttgtgatgtgtgcgttcaactcacagagtttaacctttcttttcatagagcagttaggaaacactctgtttgtaaactctgcaagtggatattcagacctctttgaggccttagttggaaacgggatttcttcatactgtgctagacagaagaattctcagtaacttccgagtgttgtgtgtattcaactcacagagctgaacgatcctttacacagagcagacttgaaacactctttttgtggaatttgcaagtggagatttcagccgctttgaggtcaatggtagaaaaggaaatatcttcgtataaaaactagacagaagcattctcaaaaactgctctgtgatgtgtgcgttcaactctcagagtttaattttcttttcattcagcagtttgtaaacactctgtttgtaaagtctgcacgtggatattttgaccacttagaggccttcgttggaaacgagtttttttcatgtaaggctagacagaagaattcccagtaacttccttgtgttgtgtgtattcaactcacagagttgaacgttcccttagacagagcagatttgaaacactctatttgtgcaatttgcaagtgtagatttcaagcgctttaagttcaatggcagaaaaggaaatatcttcgtttcaaaactagacagaatcattctcagaaactgctgtgcgatgtgtgtgttcaactctcagagtttaactttgcttttcattcagcagtttggaaacactctgtttgtaaagtctgcacgtggataatttgaccacttagaggccttcgttggaaacgggtttttttcatgtaaggctggacagaagaattctcagtaacttccttgtgtggtgtgtattcaactcacagagttgaacgatcctttacacagagcagacttgtaacactctttttgtggaatttgcaagtggagatttcagccgctttgaagtcaaaggtagaaaaggaaatatcttcctataaaaactacacagaatgattctcagaaaatcttttgtgatgtgtgcgttcaactcacagagtttaacttttcttctcatagagcagttaggaaacactctgtttgtaaagtctgcaagtggatattcagaccactttgaggccttcgttggaaacgggatttcttcatattatgctagacagaagaattcccagtaacttccttgtgttgtgtgtgttcaactcatagagttgaactttgatttacacagagcagatttgaaacactctttttgtggaatttgcaagtggagatttcaagcgctttgaggccaaaggcagaaaaggaaatatcttcgtataaaaactagacagaatcattctcagaaactgctctgcaatgtgtgcgttcaactctcagagtttaacttttcttttcattcagcagtttggaaacactctgtttgtaaagtctgcacgtggatattttgaccacttagaggccttcgttggaaacgggtttttttcctgtaaggctagacagaagaattcccagtaacttccttgtgttgtgtacattcaactcacagagttgaacgttcccttagacagagcagatttgaaacactctttttgtgcaattggcaaatggagatttcaagcgctttaagttcaatggcagaaaaggaaatatcttcgtttcaaaactagacagaatcattcccacaaactgcgttgtgatgtgttcgttcaactcacagagtttaacctttcttttcatagagcagttaggaaacagtctgtcaattctgtaagtggatattctgacatcttgtggcattcgttggaaacgggatttcttcatattctgctagacagaagaattctcagaatcttccttgtgttgtgtgtattcaactcacagagttgaacgatcctttacacagagcagacttgaaacactctttttgtggaatttgcaagtggagatttcagctgctttgaggtccatggtagaaaaggaaatatcttcgtataaaaactagacagaatgattctcagaaactcctttgtgatgtgtgtgttcaactcacagagtttaaactttctgttcatagagcagttaggaaacactctgtttgtaaagtctgcaagtggatattcagacctccttgaggccttcgttggaaacgggatttcttcatattctgctagacagaagaattctcagtaacttccttgtgttgtgtgtattcaactgacagagttgaactttcatttacacagagcagatttgaaacactctttttgtggaatttgcaaatggagatttcaagcgatttgaggccaaaggcagaaaaggaaatatcttcgtataaaaactagacagaatcattctcagaaactgctgcgtgatgtgtgcgttcaactctcagagtttaacttttcttttcattcagcggtttggaaacactctgtttgtaaaaactgcacgtggatattttgaccacttagaggccttcgttggaaacgggtttttttcatgtaaggctagacagaagaattcccagtaacttccttgtgttgtgtgcattcaactcacagagttgaacgttcccttagacagagcagatttgaaacactctatttgtgcaatttgcaagtgtagttttcaagctctttaaggtcaacggcagaaaaggaaatatcttcgtttcaaaactagacagaatgattctcataaactcctttgtgatgtgtgcgttcaactcacagagtttaacctttcttttcatagagcagttaggaaacactctgtttgtaaagcctgcaagtggatattcagacctccttgaggccttctttggaaacgggatttcttcatattctgatagacagaagaattctcagtaacttccttgtgttgtgtgtattcaactcacagagttgaacgatcctttacccagagcagacttgaaacaccctttttgtggaatttgcaagtggagatttcagccgctttgaggtcaatggtagaaaaggaaatatcttcgtataaagactagacagaatgattctcagaaactcctttgtgatgtgtgtgttcaactcacagagtttaacctttcttttcatagagcagttcgtaaacactctgtttataaagtctgcaagtggatattcagacccctttgaggccttctttggaaacgggatttcttcatattatgctagacggaagaattccccgtaacttccttgtgttgtgtgtgttcaactcacagagttgaactttcatttacatagagcagatttgaaacactctttttatggaatttgcaagtggagatttcaagcgctttgaggccaaaggcagaaaaggaaatatcttcgtataaaaactagacagaatcattctcagaaactgctctgcgatgtgtgcgttcaactctcagagtttaacttttcttttcattcagcagtttggaaacactctgtttgtaaagtctgcacgtggataatttgaccacttagaggccttctttggaaacgggtttttttcatataaggctagacagaagaattcccagtaacttccttgtgttgtgtacattcaactcacagatttgaacgctcccttagacagagcagatttgaaacactctttttgtgcaattggcaattggagatttcaagcgctttaaggtcaatggcagaaaaggaaatatcttcgtttcaaaactagacagaatgattctcagaaacttctttgtgatgtgtgcgttcaactcacagagtttaacctttcttttcatagagcagttaggaaacactctgtttgtaaactctgcaagtggatatttagacctctttgaggccttcgttggaaacgggattttttcatactgtactagacagaagaattctcagtaacttccttgtgttgtgtgtattcaactcacagagttgaaagatcctttacacagagcagacttgaaacactctttttgtggaatttgcaagtggagatttcaaccgctttgaggtcaatagtacaaaaggaaatatcttcgtagaaaaactagacagaatgattctcagaaactcctttgtgatgtgtgcgttcaactcacagagttcaacctttcttttcatagagcagttgggaaacactctgtttgtaaagtctgcaagtggatattcagacctccttgaggccttcgttggaagcgggatttcttcatcttctgctagacagaagaattctcagtaacttccttgtgttttgtgtattcaactgacagagttgaactttcatttagagagagcagatttgaaacactgtttttgtggaatttgcaagtggagatttcaagcgctttggggccaaaggcagaaaaggaaatatcttcgtataaaaactagacagaatgattctcagaaacttctttgtgatttatgcgttcaactcacagagttaaaactttcttttcatagagcagttaggaaacactctgtttgtaaagactgcacgtggatattcagacctctttgaggccttcgttggaaacgggtttttttcctgtaaggctagacagaagaattcccagtaacttccttgtgttgtgtgcattcaactcacagagttgaacgttcccttagacagagcagatttgaaacactctatttgtgcaacttacaagtgtagttttcaagctctttaaggtcaacggcagaaaaggaaatatcttcgtttcaaaactagacagaatcattaccacaaactgcgttgtgatgtgttcgttcaacccacagagtttaagctttctcttcatagagcagttaggaaacactctgtttgtgaagtctgtaagtggatattctgacatcttgtggccttcgttggaaacgggatttcttcatattctgctagacagaagaattctcagtaacttccttgtgttgtgtgtattcaactcacagagttgaacgatcctttacacagagcagagttgaaacattctttttgtggaatttgcaagtggagatttcagccgctttgaggtcaatggtagaatagcaaatatcttcctatagaaactagacagaatgattcttagaaactcctttgtgatgtgtgtgttcaactcacagagtttaacctttcttttcatagagcagttagtaaacactctgtttataaagtctgcaagtggatattcagacccctttgaggccttcgttggaaacgggatttcttcatattatgctagacagaagaattctcagtaacttccttgtgttgtgtgtattcaactcacagagttgaacgatcctttacacagagcagacttgaaacactctttttgtggaatttgcaagtggagatatcaagcgctttggggccaaaactagacagaatcatgctcagaaactgctctgcgatgtgtgcgttcaactctcagagtttaacttttcttttcattcagcagtttggaaacactctgtttgtaaagtctgcacttgcataatttgaccgcttagaggccttcgttggaaacgggtttttttcatgtaaggctagacagaagaattcccagtaacttccttgtgttgtgtgcattcaactcacagagttgaacgttcccttagacagagcagatttgaaacactctatttgtgcaatttgcaattgtagttttcaagctctttaaggtcaacggcagaaaaggaaatatcttcgtttcaaaactagacagaatcattcccacaaactgcgttgtgatgtgttcgttcaactcacagagtttaacctttctgttcatagagcagttaggaaacactctttttgtaaagtctgtaagtggatattctgacatcttgtggccttcgttagaaacgggattttttcatattctgctagacagaagaattctcagtaacttccttgtgttgtgtgtattcaactcacagagttgaacgatcctttacacagagcagacttgtaacactctttttgtgtaatttgcaagtggagatttcagccgctttgaagtcacaggtagaaaaggaaatatcttcctataaaaactagacagaatgattctcagaaactcctttgtgatgtgtgcgttcagctcacagagtttaacctttcttttcatagagcagttcggaaacactctgtttgtaaagtctgcaagtggatattcagacctctttgaggccttcgttggaaacgggatttcttcatattctgctagacagaagattcccagtaacttccttgtgttgtgtgtgttcaactcacagagttgaactttgatttacacagagcagatttgaaacactctttttgtggaatttgcaagtggagatttcaagcgctttgaggccaaaggcagaaaaggaaatatcttcgtataaaaactagacagaatcattctcagaaactgctctgcgatgtgtgcgttcaactctcagagtttaacttttcttttcattcagcagtttggaaacactctgtttgtaaagtctgcaggtggatactttgaccacttagagaccttcgttggaaacgggtttttttcctgtaaggctagacagaagaattcccagtaacttccttgtgttgtgtgcattcaactcacagagatgaacgttcccttagacagagcagatttgaaacactctatttgtgcaatttgcaagtgtagatttcaagcgctttaaggtcaatggcagaaaaggaaatatcttcgtttcaaaactagacagtatcattcccacaaactgcgttgtgatgtgttcgttcaactcacagagtttaacctttcttttcatagagcagttaggaaacagtctgtttgtaaattctgtaagtggatattctgacatcttgtggccttcgttggaaacgcgatttcttcatattctgctagacagaagaattctcagaatcttccttgtgttgtgtgtattcaactcaaagagttgaacgatcctttacacagagcagacttgaaactctctttttgtggaatttgcaagtggagatttcagccgctttgaggtccatggtagaaaaggaaatatcttcgtataaaaactagacagaatgattctgagaaactcctttgtgatgtgtgcgttcaactcacagagtttaacctttcttttcatagagcagttaggaaacactctgtttttaaagtctgcaagtggatattcagacctccttgaggccttcgttggaaacgggatttcttcatattatgctagacagaagaattccagtaacttccttgtgttttgtgtgttgaactcacagagttgaactttcatttacacagagcagatttgaaacactctttttgtggaatttgcaagtggagatttcaagggctttgaggccaaaggcagaaaaggaaatatcttcgtttcaaaactagacagaatcattctcagaaactgctgcgtgatgtgtgcgttcaactctcagagtttaagttttcttttcattcagcggtttggaaacactctgtttgtaaagtctgcacgtggaaattttgaccacttagaggccttcgttggaaacgggtttttttcatgtaaggctagacagaagaattcccagtaacttccttgtgttgtgtgcattcaactcacagagttgaacgttcccttagacagagcagatttgaaacactctatttgtgcaatttgcaagtgtagttttcaagctctttaaggtcaatggcagaaaaggaaatatcttcgtttcaaaactagacagaatgattctcagaaactcctctgtgatgtgtgcgttcaactcacagagtttaacttttcttttcatagagcagttaggaaacactctgtttgtaaagtctacaagtggatattcagacctctgtgaggccctcgttggaaacgggatttcttcatattatgctagacagaagaattctcagtaacttccttgtgttgtgtgtattcaactcacagagttgaacgatcctttacacagagcagacttgaaacactctttttgtggaatttgcaagtggagatttcagccactttgaggtcaatagtagaaaaggaaatatcttcgtagaaaaactagacataatgattctcagaaacccatttgtgatgtgtgcgttccactcacagagtttaacctttcttttcatagagcagttaggaaacactctgtttgtaaagtctgcaaggggatatttagacctctttgaggccttcgttggaaacgggatttcttcatattctgctagacagaagaattctcagtaacttccttgtgttgtgtgtattcaactcacagagttgaactttcatttagagagagcagatttgaaacactgtttttgtggaatttgcaagtggagatttcaagcgctttgtggccaaaggcagaaaaggaaatatcttcgtataaaaactagacagaatcattctcagaaactgctctgcgatgtgtgcgttcaactctcagagtttaacttttcttttcattcaccagtttggaaacactctgtttgtaaagtctgcacgtggatattttgaccacttagaggccttcgttggaaacgggtttttttcctgtaaggctagacagaagaattcccaggaacttccttgttttgcgtacattcaactcacacatttgaacgttcccttagacagagtagatttgaaacactctttttgtgcaattggcaagtggtgatttcagccgctttgaggtcaatggtagaaaaggaaatatcttcgtataaaaactagacagaatgattctgagaaactcctttgtgatgtgtgcgttcaactcacacagtttaacctttcttttcatagagcagttaggaaacactctgtttgtaaagtctgcaagtggatattcagacgtccttgaggccttcgttggaaacgggatttcttcatattctgctagacagaagaattctcagtaaattccttgtgttgtgtgtattcaactcacagagttgaacgatcctttacacagagcagacttgaaactctctttttgtggaatttgcaagtggagatttcagccgctttgaggtcaatggtagaaaaggaaatatcttcgtatagaaacaagacagaatgattctcagaaacttctttgtgatgtgtgcgttcaactcacagagtttaacctttcttttcatggagcagttaggaaacactctgtttgtaaactctgcaagtggatattcagacctatttgaggccttcgttggaaacgggatttcttcatactgtgctagacagaagaattctcagtaacttccttgtgttgtgtgtttttaactgacagagttgaactttcatttagagagagcagatttgaaacactgtttttgtggaatttgcaagtggagatttcaagcgctgtggggccaaaggcagaaaaggaaatatcttcgtataaaaactagacagaatcattctcagaaactgctctgcgatgtgtgcgttcaactctcagagtttaacttttcttttcattcagctgtttggaaacactctgtttgtaaaatctgcacgtggacaatttgaccacttagaggccttcgttggaaacgggtttttttcatgtaaggctagacagaagaattctcagtaacttccttgtgtcgtgtgtattcaactcacagagttgaacgatcctttacacagagcagacttgtaacactctttttgtggaatttgcaagtggagatttcagccgctttgatgtcaaaggtagaaaaggaaatatcttcctataaaaactagacagaatcattcccacaaactgcgttgtgatgtgttcgttcaactcacagagtttaacctttctgttcatagagcagttaggaaacactctgtttgtaaagtctgtaagtggatattctgacatcttgaggccttcgttggaaacgggatttcttcatattctgctagacagaagaattcccagtaacttccttgtgttgtgtgcattcaactcacagagttgaacgatccttcacacagagcagattagaaacactctttttattggaatttgcaagtggagatttcagccgctttgaggtcaatggtagaaaaggaaatatcttcgtataaaaactagacagaatgattctcagaaactcctttgtgatgtgtgcgttcaactcacagagttcaacctttcttttcatagagcagttgggaaacactctgtttgtaaagtctgcaagtggatattcagacttctttgaggccttcgttggaagtgggatttcttcatgttctgctagacagaagaattctcagtaacttccttgtgttgtgtgtattcaactcacagagttgaacgatgctttacacagagcagacttgaaacactctttttgtggaatttgcaagtggagatttcagccgctttgtggtcaatagtagaataggaaatatcttcctatagaaactagacagaatgattctcagaaactcctttgtgatgtgtgcgttcaactcacagagtttaccctttcttttcatagagcagttaggaaacactctgtttgtaaagtctgcaagtggatattcagacatccttgaggctttcgttggaaacgggatttcttcatattctgccagaaagaagaattctcagtaacttccttgtgttgtgtgtattcaactcacagagttgaacgatcctttacacagtagcagacttgaaacactctttttgtggaatttgcaagtggagatttcagccgctttgaggtcaatggtagaataggaaatatcttcctatagaaactagacagaatcattctcagaaactgctgcgtgatgtgtgcgttcaactctcagagtttaacttttcttttcattcagcggtttggaaacactctgtttataaagtctgcacgtggatattttgaccacttagaggccttcgttggaaacgggttttttttcatgtaaggctacacagaagaatttccagtaacttccttgtgttgtgtgcattcaactcacagagttgaacgttcccttagacagagcagatttgaaacactctatttgtgcaatttgcaagtgtagatttcaagcgctttaaggtcaaaggcagaaaaggaaatatcttcgtttctaaactagacagaatcattcccacaaactgcgttgtgatgtgttcgttcaactcacagagtttaacctttctgttcatagagcagttaggaaacactctgtttgtaaagtctgtaagtggatattctgacatcttgcggccttcgttggaaacgggatttcttcatattatgctagacagaataattctcagtaacttccttgtgttttgtgtattcaactcacagagttgaacgatcctttacagagagcagagttgaaacactctttttgtggaatttgcaagtggagatttcagccgctttgaggtcaatggtagaaaaggaaatatcttcgtataaagactagacagaatgattctcagaaactcctttgtgatgtgtgagttcaactcacagagtttaacctttcttttcatagagcagttaggaaacactctgtttgtaaagtctgcaagtggatattcagacctctttgaggccttcgttggaaacgggatttcttcatattctgctagacagaagaattctcagtaacttccttgtattgtgtgtattcaactgacagagttgaactttcatttagagagagcagatttgaaatactgtttttgtggaatttgcaagtggagatttcaaacgctttggggccaaaggcagaaaaggaaatatcttcgtatgaaaactagacagaatcattctcagaaactgctctgcgatgtgtgcgttcgaactctcagagtttaacttttcttttcattcagcagtttggaaacactctgtttgtaaagtctgcacgtggatattttgaccacttagaggccttcgttggaaacgggtttttttcctgtcaggctagacagaagaattcccagtaacttccgtgtgttgtgtacattcaactcacagagttgaacgttcccttagacagagcagacttgtcacactctttttgtggaatttgcaagtggagatttcagccgctttgaagtcaaaggtagaaaaggaaatatcttcctataaaaactagacagaatgattctcagaaactcgtttgtgatgtgtgtgttcaactcacagagtttaacctttcttttcatagagcagttaggaaacactctgtttgtaaagtctgcaagtggatattcagacctctttgaggccttcgttggaaacggggttttttcatataaggctagacagaagaattctcagaaacttccttgtgttgtgtaatttcaactcacagagttgaacgatgctttacacagagtagacttgaaacactctttttgtggaatttgcaagtggagatttcagccgctttgaggtcaattgttgaaaaggaaatatcttcgtataaaaactagacagaatgattctcagaaactcctttgtgatgtgtgcgttcaactcacagagtttaacctttcttttcatagaggagttaggaaacactctgtttgtaaagtctgcaagtggatattcagacctctttgaggccttcgttggaaacgggtttttttcatataaggctagacagaagaattctcagtaacttccttgtgttgtgtgtattcaactgacagagttgaactttcatttagagagagcagattttaaacactgtttttgtggaatttgcaagtggagatttcaagcgctttggggccaaaggcagaaaaggaaatatcttcgtataaaaactagacagaatcattctcagaaactgctctgcgatgtgtgcgttcaactctcagagcttaacttttcttttcattcagcaatttggaaacactctgtttgtaaagtctgcacgtggataacttgaccacttagaggccttcgttggaaacgggtttttttcatgtaaggctagacagaagaattctcagtaacttccttgtgttgtgtgtattcaactcacagagttgaacgatcctttacacagagcagacttgtaacaccctttttgtggaatttgccagtggagatttcagccgctttgaagtcaaaggtagaaaaggaaatatcttcctataaaaactagacagaatcattcccacaaactgcgttgtgatgtgttcgttcaactcacggagtttaacctttcttttcatagagcagttaggaaacagtctgtttgaaaattctgtaagtggatattctgacagcttgtggccttcgttggaaacgggatttcttcatattctgctagacagaagaattctcagtaacttccttttgttgtgtgtattcaactcacggagttgaacgatcctttacacagagcagagttgaaacactctttttgtggaatttgcaagtggagatttcagccgctttgaggtcaatagtagaaaaggaaatatcttcgtagaaaaactagacagaatgattttcagaaactcctttgtgatgtgtgcgttcaactcacagagtttaacctttcttttcatagagcagttaggaaacactctgtttgtaaagtctgcaagtggatattcagatatccttgaggttttcgttggaaacgggatttcttcatattctgctagaaagaagaattcccagtaacttccttgtgttgtgtgtgttcaactcacagagttcaactttcatttacccagagcagatttgaaacactctttttgtggaatttgcaagtggagatttcaagcgctttgaggccaaaggcagaaaaggaaatatcttcgtttcaaaactagacagaatcattctcagaaactgctctgcgatgtgtgcgttcaactctcagagtttaactttgcttttcattcagcagtttggaaacactctgtttgtaaagtctgcacgtggataatttgaccacttagaggccttcgttggaaacgggtttttttcatgtaagcctagacagaagaattccccgtaacttccttgtgttgtgtacattcaactcacagagttgaacgttcccttagacagagcagatttgaaacactctttttgtgcaattggcaaatggagatttcaagcgctttaaggtcaatggcagaaaaggaaatatcttcgtttcaaaactagacagaatcattcccacaaactgcgttgtgatgggttcgttcaactcacagagtttaacctttccgttcatagagcagttaggaaacacactgtttgtaaagtctgtaagtggatattctgacatccttgtggccctcgttggaaacgggatttcttcatattctgctagacagaagaattctcagtaacttccttgtgttgtgtgtattcaactcacagagttgaacgatcctttacacacagcagacttgaaacactctttttgtggaatttgcaagtggagatttcagccgctttgaggtcaatggtagaataggaaatatcttcctatagaaactagacagaatgattctcagaaactcctttgtgatgtgtgcgctcaactcacagagtttaacctttcttttcatagagcagttaggaaacactctgtttgtaaagtctgcaagtggatattcagacctctttgaggccttcgtaggaaacgggatttcttcatattatgctagagagaagaatactcagtaacttccttgtgttgtgtgtattcaactgacagagttgaactttcatttagagagagcagatttgaaatactgtttttgtggaatttgcaagtggagatttcaaacgctttggggccaaaggcagaaaaggaaatatcttcgtataaaaactagacagaatcattctcagaaactgctctgcgatgtgtgcgttcaactctcagagtttaacttttcttttcattcagaagtttggaaacactctgtttgtaaagtctgcacgtggataacttgaccacttagaggccttcgttggaaacgggtttttttcatgtaaggctagacagaagaattcccagtaacttccttgtgttgtgtacattcaactcacagagttgaacgttcccttagagcagatttgaaacactctttttgtgcaattggcaaatggagatttcaagcgctttaaggtcaatggcagaaaaggaaatatcttcgtttcaaaactagacagaatcattcccacaaacagcgttgtgatgtgttcgttcaactcacagagtttaacctttcttttcatagagcagttaggaaacagtctgtttgaaaattctgtaagtggatattctgacatcttgtggccttcgttggaaacgggatttcttcatattctgctagacagaagaattctcagtaacttccgcgtgttgtgtgtattcaactcacagagttgaacgatcctttacacagagcagacttgaaacactctttttgtggaatttgcaagtggagatttcagccgctttgaggtcaatggtagaaaaggaaatatcttcgtataaaaactagacagaatgattctcagaaactcctttgtgatgtgtgcgttcaactcacagagtttaacctttcttttcatagagcagttaggaaacactctgtttgtaaagtctgcaagtggatattcagacatctttgaggctttcgttggaaacgggatttcttcatattctgctagaaagaagaattcccagtaacttccttgtgttgtgtgtgttcaactcacagagttgaactttcacttacacagagcagatttgaaacactctttttgtggaatttgcaagtggagatttcaagcgctttgaggccaaaggcagaaaaggaaatatcttcgtttcaaaactagacagagtcattctcagaaactgctgcgtgatgtgtgcgttcaactctcagagtttaacttttcttttcattcagcggtttggaaacactctgtttgtaaagtctgcatgtggaaattttgaccacttagaggccttcgttggaaacgggtttttttcatgtaaggctagacagaagtattcccagtaacttccttctgttgtgtgcattcaactcacagagttgaacgttcccttagacagagcagatttgaaacactctatttgtgcaatttgcaagtgtagatttcaagcgctttaaggtcaacggcagaaaaggaaatatcttcgtttcaaaactagacagaatcattcccacaaactgcgttgtgatgtgttcgttcaactcacagagtttaacctttcttttcatagagcagttaggaaacagtctgtttgaaaactctgtaagtggatattctgacatcttgtggccttcgttggaaacgggatttcttcatattctgctagacagaagaattctcagtaacttcccttgtgttgtgtgtattcaactcacagagttgaacgatcctttacacagagcagacttgaaacacactttttgtggaatttgcaagtggagatttcagccgttttgaggtcaatggtagaaaaggaaatatcttcgtataaagactagacagaaatgattctcagaaactcctttgtgatgtgtgcgttcaactcacagagtttaacctttcttttcatagagcagttaggaaacactctgcttgtaaagtctgcaagtggatattcagccctctttgaggccttcgttggaaatgggtttttttcatataaggctagacagaagaattctcagtaacttccttgtgttgtgtgtattcaactgacagagttgaactttcatttagacagagcagatttgagacactctttttgtggaatttgcaaaggtagatttcatgcgctttgaggccaaaggcagaaaaggaaatatcttcgtataaaaactagacagaatcattctcagaaactgctctgcgatgtgtgcgttcaactctcagagtttaacttttcttttcattcagcagtttggaaacactctgtttgtaaagtctgcacgtggataatttgaccacttagaggccttcgttggaaacgggttttttcctgtaaggctagacagaagaattcccagtaacttccttgtgttgtgtgcattccactcacagagttgaacgttcctttagacagagcagatttgaaacactctatttgtgcaatttgcaagtgtagatttcaagcgctttaaggtcaatggcagaaaaggaaatatcttcgtttcaaaactagacagaatcattcccaaaaactgcgttgtgatgtgttcgttcagctcacagagtttaacctttcttttcatagagcagttaggaaacagtctgtttgtaaattctgtaagtggatattctgacatcttgtggccttcgttggaaacgggatttcttcatattctgctagacagaagaattctcagtaacttccttgtgttgtgtgtattcaactcacagagttgaacgatcctttacacagagcagacttgaaacactctttttgtggaatttgcaagtggagatttcagccgctttgaggtcaatggtagaaaagtaaataacttcgtataaagactagacagaatgattctcagaaactcctttgtgatgtgtgcgctcaactcacagagtttaacctttcttttcatagagcagttaggaaacactctgtttgtaaagtctgcaagtggatattcagacctctttgaggccttcgtaggaaacgggatttcttcatattatgctagacagaagaattctcagtaacttccttgtgttgtgtgtattcaactgacagagttgaactttcatttagagagagcagatttgtaacactgtttttgtggaatttgcaagtggagatttcaagcgctttgcggccaaaggcagaaaaggaaatatcttcgtataaaaactagacagaatcattctcagaaaatcctctgtgatgtgtgcgttcaactctcagagtttaacttttcttttcattcagcagtttggaaacactctgtttgtaaagtctgcacgtggatattttgaccacttagaggccttctttggaaacgggtttttttcatgtaagtgtagacagaagaattcccagtaacttccttgtgttgtgtgcattcaactcacagagttgaacgttcccttagacagagcacatttgaaacactctatttgtgtaatttgcaagtgtagatttcaagcgctttaaggtcaacggcagaaaaggaaatatcttcgtttcaaaactagacagaatcattctcagaaactgctctgcgatgtgtgcgttcaactctcagagtttaacttttcttttcattcagcagtttggaaacactctgtttgtaaagtctgcaagtggatattcagacctctttgaggccttcgttggaaacgggatttcttcatactatgctagacagaagaattctcagtaacttccttgtgttgtgtgtattcaactcacagagttgaatgatcctttacacagagcagacatgaaacactctttttgtggaatttgcaagtggagatttcagccgctttgaggtcaatggtagaaaagggaatatcttcgtatagaaactagacagaatgattctcagaaactcctttgtgatgtgtgcgttcagctcacagagtttaacctttcttttcatagagcagttaggaaacactctgtttgtaaagtctgcaagtggatattcagacctctttgaggccttcgttggaaacgggatttcttcatattctgctagacagaacaattctcagtaacttccttgtgttgtgtgtgttcaactcacagagttgaactttcatttacacagagcagatttgaaacactctttttgtggaatttgcaagtggagatttcaagcgctttgaggccaaaggcagaaaaggaaatatcttcgtataaaaactagacagaatcattctcagaaactgctgcgtgatgtgtgcgttcaactctcagagtttaacttttcttttcattcagcggtttggaaacactctgtttgtaaagtctgcacgtggatattttgaccacttagaggccttcgttggaaacgggtttttttcatataaggctagacagaagaattctcagtaacttccttgtgttgtgtgtattcaactcacacagttgaacgatcctttacacagagtagacttgtaacactctttttgtggaatttgcaagtggagatttcagccgctttgaagtcaaatgtagaaaaggaaatatcttcctataaaaactagacagaacgattctcagtaaactcctttgtgatgtgtgcgttcaactcacagagtttaacctttcttttcatagagcagttaggaaacactctgtttgtaaagtctgcaagtggatattcagacctctttgaggccttcgttggaaacgggatttcttcatattctgctagacagaagaattctcagtaacttctttgtgttgtgtgtattcaactcacagagttgaacgatcctttacacagagcagacttgaaacactctttttgtggaatttgcaagtggagatttcagccgctttgaggtcaatagtagaaaaggaaatatcttcgtagaaaaactagacagaatgattctcagaaactcctttgtgatgtgtgcgttcaactcacagagttcaacctttcttttcatagagcagttgggaaacactctgtttgtaaagtctgcaagtggatattcagacttctttgaggccttcgttggaagcgggatttcttcatgttctgctagaaagaagaattcccagtaacttccttgtgttgtgtgtgttcaactcacagagttgaactttcatttacccagagcagatttgaaactctctttttgtggaatttgcaagtggagatttcaagcgctttgaggccaaaggcagaaaaggaaatatcttcgtttcaaaactagacagaatcattctcagaaactgctgcgtgatttgtgcgttcaactctcagagtttaacttttcttttcattcagcggtttggaaacactctgtttgtaaagtctgcacgtggatattttgaccacttagaggccttcgttggaaacgggtttttttcatgtaaggctagacagaagaattcccagtaacttccttgtgttgtgtgcattcaactcacagagttgaacgttcccttagacagagcagatttgaaacactctatttgttcaatttgcaagtgtagatttcaagcgctttaaggtcaacggcagaaaaggaaatatcttcgtttcaaaactagacagaatcattcccacaaactgcgttgtgatgtgttcgttcaactcacagagtttaacctttcttttcatagagcagttaggaaacagtctgtttgtcaattctgtaagtggatattctgacatcttgtggccttcgttggaaacggaatttcttcatattctgctagacagaagaattctcagtaacttccttgtgttgtgtgtattcaactcacagagttgaacgatcctttacacagagcagacttgaaatactctttttgtggaatttgcaagtggagatttcagccgctttgaggtcaatggtagaaaagggaatatcttcgtatagaaactagacagaatgattctcagaaactcctttgtgatgtgtgcgttcaactcacagagtttaacctttcttttcatagagcagttaggaaacactctgtttgtaaagtctgcacgtggatatttggacttctttgaggccttcgttggaaacgggtttttttcatgtaaggctagacagaagaattttcagtaacttccttgtgttgtgtgtattcaactgacagagttgaactttcatttaaagagagcagatttgtaacactgtttttgaggaatttgcaagtggagatttcaagcgatttgcggccaaaggcagaaaaggaaatgtcttcgtataaaaactagacagaatcattctcagaaactgctgcatgatgtgtgcgttcaactctcagagtttaacttttcttttcattcagcggtttggaaacactctgtttgtaaagtctgcacctggatattttgacgacttagacgccttcgttggaaacgggtttttttcatgtaaggctagacagaagaattcccagtaacttccttgtgttgtgtgcattcaactcaaagagttgaacgttccattagacagagcagatttgaaacactctatttgtgcaatttgcaagtgtagatttcaagcgctttaaggtcaatggcagaaaaggaaatatcttcgtttcaacacaagacagaatcattctcacaaactgcgttgtgatgtgttcgttcaactcacagagattaacctttctgttcatagagcagttaggaaacactctgtttgtaaagtctgtaagtggatattctgacatcttgtggccttcgttggaaacgggatttcttcatattctgctagacagaagaattctcagtaacttccttgtgttgtgtgtattcaactcacagagttgaacgatcctttacacagggcagacttgaaacactctttttgtggaatttgcaagtggagatttcagccgctttgaggtcaatggtagaaaagggaatatcttcgtttagaaactagactgaatgattctcagaaactcctttgtgatgtgtgcgttcaactcacagagtttaacctttcttttcatagagcagttaggaaatactctgtttgtaaagtctgcaagtggatattcagacatccttgaggctttcgttggaaacgggatttcttcatattctgctagaaagaataattctcagtaacttccttgtgttgtgtgtattcaactcacagtgttgaacgatcctttacagagagcagacttgaaacactctttttgtggaatttgcaagtggagatttcagccgctttgaggtcaatggtagaataggaaatatcttcctatagaaactagacagaatcattctcagaaactgctctgtgatgtgtgcgttcaactctcagagtttaacttttcttttcattcagcagtgtggaaaaactctgtttctaaagtctgcacgtggatattctgaccacttagaggccttcgttggaaacgggtttttttcctgtaaggctagacagaagaattcccagtaacttccttgtgttgtgtgcattcaactcacagagttgaacgttcccttagacagagcagatttgaaacactctatttgtgcaatttgcaagtgtagatttccagctctttatggtcaacggcagaaaaggaaatatcttcgtttcaaaactagacagaatgattctcagaaactcctttgtgatgtgtgcgttcaactcacagagtttaacctttcttttcatagagcagttaggaaacactctgtttgtaaagtctgcaagtggatattcagacatccttgaggctttcgttggaaacgggatttcttcatattctgctggaaagaagaattctcagaatcttccttgtgttgtgtgtattcaactcacagagttgaacgatgatttacacagagcagatttgaaacactctttttgtggaatttgcaagtggagatttcagccgctttgaggtcagtggtagaaaaggaaatatcttcatataaaaattagacagaatgattctcagaaactcctttgtgatgtgtgcgttcaactcacagagtttaacctttcttttcatagagcagttaggaaacactctgtttgtaaagtctgcaagtggatattctgacctccttgaggccttcgtgggaaacgggatttcttcatattctgctagacagaagaattctcagtaacttccttgtgttgtgtgtattcaactgacagagttgaactttcatttagagagagcagatttataacactgtttttgtggaatttgcaagtggagatttcaagcgctttggggccaaaggcagaacaggaaatatcttcgtataaaaactagacagaatcattctcagaaaatgctctgtgatgtgtgcattcaactctcagagtttaacgtttcttttcattcagcagtttggaaacactctgtttgtaaagtctgcacgtggatattttgaccacttagaggccttcgttggaaacgggtttttttcatgtaagggtagacagaagaattcccagtaacttgccttgtgttgtgtgcattcaactcacagagctgaacgttcccttagacagagcagatttgaaacactctatttgtgcaatttgcaagtgtagatttcaagcgctttaaggtcaatggcagaaaaggaaatatgcttcgtttcaaaactagacagaatgattctcagaaactcctttgtgatgtgtgcgttcaactcacagagtttaacctttctttttatagagcagttaggaaacactctctaaagtctgcaagtggatattcagacctccttgacgtcttcgttggaaacgggatttcttcatattctgctagacagaagaattctcagtaacttccttgtattgtgtgtattcaactcacagagttgaacgatcctttacacagagcagacttgaaacactctctttgtggaatttgcaagtggagatttcagccgctttgaggtcaatggtagaataggaaatatcttcctatagaaacaagacagaatgattctcagaaactcctttgtgatgtgtgcgttcaactcacagagtttaacctttcttttcatagagcagttaggaaacactctgtttgtaatgtctgcaggtggatattcagacatctttgaggctttcgttggaaacgggatttcttcatattctgctatacagaagaattctcattaacttccttgtgttgtgtgtattcaactgacagagttgaactttcatttagagagagcagatttgaaacactgtttttgtggaatttgcaagtggagatttcaagcgctttggggccaaaggcagaaaaggaaatatcttcgtataaaaactagacagaatcattctcagaaaactgctgcgtgatgtgtgcgttcaactctcagagtttaacttttcttttcattcagcggtttggaaacactctgtttgtaaagtctgcacgtggatattttgaccacttagaggccttcgttggaaacgggttttttttcatgtaaggctagacagaagaattcccagtaacttccttgtgttgtgtacattcaattcacagagttgaacgttcccttagacagagcagatttgaaacactctttttgtgcaattggcaagtggagatttcaagcgctttaaggtcaatggcagaaaaggaaatatcttcgtttcaaaactagacagaatcattcccacaaactgcgttgtgatgtgttcgttcaacccacagagtttaacctttctgttcatagagcagttaggaaacactctgtttgtaaagtctgaaagtggatattctgacatcttgtggccttcgttggaaacgggatttcttcatattctgctagacagaagaattctcagtaacttccttgtgttgtgtgtattcaactcacagagttgaacgatcctttacagagagcagacttgaaacactctttttgtggaatttgcaagtggagatttcagccgctttgaggtcaatagtagaataggaaatatcttcgtagaaaaactagacagaatgattctcagtaactcctttgtgatgtgtgcgttcaactcacagagtttaacctttcttttcatagagcagttaggaaacactctgtttgtagagtctgcaagtggatattcagacctccttgaggccttcgttggaaacgggatttcttcctattatgctagacagaagaattctcgggaacttccttgtgttgtgtgtattcaactgacagagttgaactttcatttagagagagcagatttgaaacactgtttttgtggaatttgcaagtggagatttcaaacgctttggggccaaaggcagaaaaggaaatatattcctataaaaactagacagaatcattctcagaaactgctgcgtgatgtgtgcgttcaactctcagagtttaacttttcttttcattcagcggtttggaaacactctgtttgtaaagtctgcccgtggatattttgaccacttagaggccttcgtgggaaacgggtttttttcacgtaaggctagacagaagaattcccagtaacttccttgtgttgtgtgcattcaactcacagagttgaacgttcccttagacagagcagatttgaaatactctatttgtgcaatttgcaagtgtagatttcaagcgctttaaggtcaacggcagaaaaggaaatatcttcgtttcaaaactagacagaatgattctcagaaacttcattgtgacgtgtgcgttcaactcacagagtttaacctttcttttcatagagcagttaggaaacactctgtttgtaaagtctgcatgtggatattcagacctctttgaggccttcgttggaaacgggatttcttcatactgtgctagacagaagaattctcagtaacttccttgtgttgtgtgtattcaactcacagagttgaacgatcctttacacagagcggacttgaaacacactttttgtggaatttgcaagtggagatttcagccgcgttgaggtcaatggtagaaaaggaaatatcttcgtataaaaactagacagaatgattctcagaaactcctttgtgatgtgtgcgttcaactcacagagtttaacctttcttttcatagagcagttaggaaacactctgtttgtaaagtctgcaagtggattctcagtcctctttgaggctttctttggaaacggcatttcttcatattatgctagacagaagaattcccagtaacttcattgtgttgtgtgtgttcaactcacagagttgaacttccatttacacagagcagatttgaaacactctttttgtggaatttgcaagtggagatttcaagcgatttgaggccaaaggcagaaaaggaaatatcttcgtttcaaaactagacagaatcattctcagaaactgctgcgtgatgtgtgcgttcaactctcagagtttaacttttcttttcattcagcggtttggaaacactctgtttgtaaagtctgcacgtggaaattttgaccacttagatgccttcgttggaaacgggtttttttcatgtaaggctagacagaagaattcccagtaacttccttgtgttgtgtgcattcaactcacagagttgaacgttcccttagacagagcagatttgaaaaactctatttgtgcaatttgcaagtgtagatttcaagcgctttaaggtcaacggcagaaaaggaaatatcttcgtttcaaaactagacagaatcattcccacaaactgcgttgtgaagtgttcgttcaactcacagagtttaacctttctgttcatagagcagttaggaaacactctgtttgtaaagtctgtaagtggatattctgacatcttgtggccttcgttggaaaagggatttcttcatattctgctagacagaagaattctcagtaacttccttgtgttgtgtgtattcaactcacagagttgaacgatcctttacacagagcagacttgaaacactctttttgtggaatttgcaagtggagatttcagccgctttggggtcaatggtagaaaaggaaatatcttcgtataaaaactagacagaatgattctcagaaactcctttgtgatgtgtgcgttcaactcacagagttcaacctttcttttcatagagcagttgggaaacactctgtttgtaatgtctgcaagtggatattcagacttctttgaggccttcgttggaagcgggatttcttcatgttctgctagacagaagaattctcagtaacttccttgtgttgtgtgtattcaactcacacagttgaacgatcctttacacagagcagacttgtaacactctttttgtggaatttgcaagtggagatttcagccgctttgaagtcaaaggtagaaaaggaaataacttcctataaaaactagacagaatgattctcagaaactcctttgtgatgtgggtgttcaactcacagagtttaacctttcttttcgtagagcagttaggaaacactgtgattgtaaagtctgcaagtggatattccgacctctttgaggccttcgttggaaacgggtttttttcatataagactagacagaagaattctcagtaacttccttgtgttgtgtgtattcaactgacagagttgaactttcatttagagagaacagatttgaaacactgtttttgtggaatttgcaagtggagatttcaagcgctttggggccaaaggcagaaaagggaatatcttcgtagaaaaacaagacagaatcattctcagaaactgctctgcgatgtgtgcgttcaactctcagagtttaacttttcttttcattcagcagtttggaaacactctgtttgtaaagtctgcacgtggatattttgaccacttagaggccttcgttggaaacgagtttttttcctgtaaggctagacagaagaattccccgtaacttccttgtgttgtgtgcattcaactcacagagttgaacgttcccttagacagagcagatttgaaacactctatttgtgcaatttgcaagtgtagatttcaagcgctttaaggtcaatggcagaaaaggaaatatcttcgtttcaaaactagacagaatcattcccacaaactgcgttgtgatgtgttcgttcaactcacagagtttaacctttccgttcatagagcagttaggaaacactctgtttgtaaagtctgtaagtggatattctgacatcttgtggccatcgttggaaacgggatttcttcatattctgctagacagaagaattctcagtaacttccttgtgttgtgtgcatttaactcacagagttgaacgatcctttacacagagcagacttgaaacactctttttgtggaatttgcaagtggagatttcagccgctttgaggtcaatggtagaaaaggaaatatcttcgtataaagactagacagaatcattctcagaaagtcctttgtgatgtgtgtgttcaactcacagagtttaacctttcttttcatagagcagttagtaaacactctgtttataaagtctgcaagtggatattcagacccctttgaggccttcgttggaaacgggatttcttcatattatgctagacagaagaattcccagtaacttccttgtgttgtgtgtgttcaactcacagagttgaacttccatttacacagagcagatttgaaacactctttttgtggaatttgcaagtggagatttcaagcgatttgaggccaaaggcagaaaaggaaatatcttcgtttcaaaactagacagaatcattctcagaaactgatgcgtgatgtgtgcgttcaactctcagagtttaacttttcttttcattcaggggtttggaaacactctgtctgtaaagtctgcacgtggatattttgaccacttagaggccttcgttggaaaagggtttttttcatgtaaggctagacagaagaattcccagtaacttccttgtgttgtgtgcattcaactcacagagttgaacgttcccttagacagagcacatttgaaacactctatttgtgcaatttgcaattgtagatttcaagcgctttaaggtcaatggcagaaaaggaaatatcttcgttttaaaactagacagaatcattcccacaaactgcgttgtgatgtgttcgttcaactcacagagttttacctttctgttcatagagcagttaggaaacactctgtttgtaaagtctgtaagtggatattctgacatcttgtggccttcgttggaaatgggatttcttcatattctgctagacagaagaattctcagtaacttccttgtgttgtgtgtattcaactcacagagttgaacgatcctttacacagagcagacttgaaacactctttttgtggaatttgcaagtgtagatttcagccgctttgaggtcaatagtagaaaaggaaatatcttcgtagaaaaactagacagaatgattctcagaaactcctttgtgatgtgtgcgttcaactcacagagtttaacctttcttttcatagagcagttaggaaacactctgtttgtaaagtctgcaagtggatattcagacctctttgaggccttcgttggaaacgggtttttttcttgtaaggctagacagaagaattcccagtaacttccttgtgttgtatacattcaactcacagagttgaacgttcccttagacagagcagatttgaaacactctttttgtgcaattggcaagtggtgatttcagccgctttgaggtcaatggtagaaaagggaatatcttcgtataaaaactagacagaatcattctcagaaactgctctgcgatgtgtgcgttcaactctcacagtttaacttttcttttcattcagcagtttggaaacactctgtttgtaaagtctgcacgtggataatttgaccacttagaggccttcgttggaaacgggttattttcatgtaagtctagacagaagaattcccagtaacttccttgtgttgtgtgcattcaactcacagagctgaacgttcccttagacagaacagatttgaaacactctatttgtgcaatttgcaagtgtagatttcaagcgctttaaggtcaacggcagaaaaggaaatatcttcgtttcaaaactagacagaatcattcccacaaactgcgttgtgatgtgttcgttcaactcacagagtttaacctttctgttcatagagcagttaggaaacactctgtttgtaaagtctgcaagtggatattctgacatcttgtggccttcgttggaaacgggatttcttcctattctgctagacagaagaattctcagtaacttccttgtgttgtgagtattcaactcacagatttgaacgatcctttacacagagcagacttgaaacactctttttgtggaatttgcaagtggagatttcagcctctttgaggtcaatggtagaataggaaatatcttcctatagaaactagacagaatgattctcagaaactcctttgtgatgtgtgcgttcaactcagagagtttaacctttcttttcatagagcagttaggaaacactccgtttgtaaagactgcaagtggatattcagacctctttgaggccttctttggaaacgggatttcttcatattatgctagacagaagaattctcagtaacttccttgtgttgtgtgtattcaactgacagagttgaactttcatttagagagagcagatttgaaacactgtttttgtggaatttgcaagtggagatttcaagcgctttggggccaaaggcagaaaaggaaatatcttcgtagaaaaactagacagaatcattctcagaaactgctctgcgatgtgtgcgttcaactctcagagtttaacttttcttttcattcagaagtttggaaacactctgtttgtaaagtctgcacgtggataacttgaccacttagaggccttcgttggaaacgggtttttttcatgtaaggctagacagaagtattcccagtaacttccttgtgttgtgtacattcaactcacagagttgaacgttcccttagacagagcagatttgaaacacactttttgtgcaattggcaagtggagatttcaagcgctttaaggtcaatggcagaaaaggaaatatcttcgtttcaaaactagacagaatcattcccacaaactgcgttgtgatgtgttcgttcaactcacagagtttaacctttcttttcatagagcagttaggaaacagtctgtttgtaaattctgtaagtggatattctgacatcatgtggccttcattggaaacgggatttcttcatattctgctagacagaagaattcccagtaacttccttgtgttgtgtgtattcaactcacagagttgaccgatcctttacacagagcagacttgtaacactctttttgtggaatttgcaagtggagatttcagccgctttgaagtcaaaggtagaaaagggaatatcttcctataaaaactagacagaatgattctcagaaactcctttgtgatgtgtgtgttcaactcacagagtttaacctttcttttcatagagcagctagtaaacactctgtttataaagtctgcaagtggatattcagacccctttgaggccttctttggaaacgggatttcttcatattctgctagacagaagaattctcagtaacttccttgtgttgtgtgtattcaactgacagagttgaactatcatttagagagagcagatttgaaacactgtttttgtggaattggcaagtggagatttcaagcgctttggggccaaaggcagaaaaggaaatatcttcgtataaaaactagacagaatcattctcagaaactgctctgcgatgtgtgcgttcaactctcagagtttaacttttcttttcattcagcagtttggaaacactctggttgtaaagtctgcacgtggataacttgaccacttagaggccttcgttggaaacgggtttttttacctgtaaggctagacagaagaattcccagtaacttccttgtgttgtgtacattcaactcacagagttgaacgttcccttagacagagcagatttgaaacactctttttttgcaattggcaaatggagatttcaagcgctttaaggtcaatggcagaaaaggaaatatcttcgtttcaaaactagacagaatgattctcagaaactcttttgtgatgtgtgcgttcaactcacacagtttaacctttcttttcatagagcagttaggaaacactgtttgtaaagtctgcaagtggatattcagacctccttgaggccttcgttggaaacgggatttcttcatattatgctagacagaagaattctcagtaacttccttgtgttgtgtgtattcaactcacagagttgaacgatcctttacacagagcagacttgaaacactctttttgtggaatttgcatatggagacttcagccgctttgaggtcaatggtagaataggaaatatcttcctatagaaactagacagaatgattctcagaaacttctttgtgatgtgtgcgttcaactcacagagtttaacctttcttttcatagagcagttaggaaacactctgtttgtaaactctgcaagtggatgttcagacctctttgaggccttggttggaaacgggatttcttcatactatgctagacagaagaattctcagtaacttccttgtgttgtttgtattcaactgacagagttgaactttcatttagagagagcagatttgaaacactgtttttgtggaatttgcaagtggagatttcaagcgctttggggccaaaggcagaaaaggaaatatcttcgtataaaaactagacagaatcattctcagaaactgctgcgtgatgtgtgcgttcaactctcagagtttaacttttcttttcattcagcggtttggaaacactctgtaaagtctgcacgtggatattttgaccacttagatgccttcgttggaaacgggtttttttcatgtaaggctagacagaagaattcccagtaacttccttgtgttgtgtgcattcaactcacagagttgaacgttcccttagacagagcagatttgaaacactctatttgtgcaatttgcaagtgtagatttcaagcgctttaaggtcaatggcagaaaaggaaatatcttcgtttcaaaactacagagaatcattcccccaaactgcgttgtgatgtgttcgttcaactcacagagtttaacctttcttttcatagagcagttaggaaacagtctgtttgtcaattctgtaagtggatattctgacatcttgtggccttcgttggaaacgggatttcttcatattctgctagacagaagaattctcagtaacttccttgtgttgtgtgtattcaactcacagggttgaacgatcctttacacagagcagacttgtaacactctttttgtggaatttgcaagtggagatttcagccgctttgaagtcaaaggtagaaaaggaaatatcttcctataaaaactagacagaatgattctcagaaacttctttgtgatgtgtgcgttcaactcacagagtttaacctttcttttcatagagcagttaggaaacactctgtttgtaaactctgcaagtggatattgagacctctttgaggccttcgttggaaacgggatttcttcatactgtgctagacagaagaattctcagtaacttccttgtgttgtgtgtattcagctgacagagttgaactatcatttagagagagcagatttgaaacactgtttttgtggaattggcaagtggagatttcaagcgctttggggccaaaggcagaaaaggaaatatcttcgtataaaaactagacagaatgattctcagaaactgctctgcgatgtgtgcgttcaactctcagagtttaacttttcttttcattcagcagtttggaaacactctgtttgtaaagtctgcacgtggataatttgaccacttagaggccttcgttggaaacgggtttttttcatgtaaggctagacagaagaattctcagtaacttccttgtgttgtgtgtattcaactcacagagttgaacgatcctttacacaaagcagacttgtaacactctttttctggaatttgcaagtggagatttcagccgctttgaagtcaaaggtagaaaaggaaatatcttcctataaaaactagacagaaatcattcccacaaactgcgttgtgatgtgttcgttcaactcacagtagtttaacctttctgttcatagagcagttaggaaacactctgtttgtaaagtctgtaagtggatattctgacatcttgtggccttcgttggaaacgggatttcttcatattctgctagacagaagaattctcagtaactttccttgtgttgtgtgtattcaactcacagagttgaacgatcctttacacagagcagacttgaaacattctttttgtggaatttgcaagtggagattttagccgctttgaggtcaatggtagaataggaaatatgttcctatagaaactagacagaatgattctcataaactcctttgtgatgtgtgcgttcaactcacagaatttaacctttcttttcatagcgcagttaggaaacactctgtttgtaaagtctgcaagtggatattcagacatcttttaggccttcgttggaaacgggatttcttcatattatgctagacagaagaattctcagtaacttccttgtgttgtgtttattcaactcacagatttgaatgatcctttacacagagcagacttgaaacaccctttttgtggaatttgcaagtggagatttcagccgatttgaagtcaatggtagaaaagtaaatatcttcgtataaagactagacagaatcattctcagaaactgctgcgtgatgtgtgcgatcaactctcagagtttaacttttcttttcattcagcggtttggaaacactctgtttgtaaagtctgcacgtggaaattttgaccacttagagaccttcgttggaaacgggattttttcatgtaaggctagacagaagaattcccagtaacttccttgtgttgtgtacattcaactcacagagttgaacgttcccttaaacagagcagatttgaaacactctttttgtgcaattggcaagtggagatttcaagcgctttgaggtcaatggcagaaaaggaaatatcttcgtttcaaaactagacagaatgattctcagaaaactcctttgtgatgtgtgcgttcaactcacagaatttaacttttcttttcatagagcagttaggaaacactctgtatgtaaagtctgcaagtggatattcagacctcttttgaggccttcgttggaaacgggatttcttcatattctgctagacagaataattctcagtaacttctttgtgttgtgtgtattcaactcacagagttgaaggatcctttacagagagcaggcttgaaacactctttttgtcgaatttgcaagtggagatttcagccgctttgaggtcaatggtagaataggaaatatcttcttatagaaactagacagaatgattctcagaaacttctttgtgatgtgtgtgttcaactcacagagtttaacctttcttttcatagagcagttaggaaacactctgcttgtaaagtctgcaagtggatattcagacctcgttgaggccttcgttggaaacgggatttcttcatattctgctagacagaagaattctcagtaacttccttgtgttgtgtgtattcaactgacagagttgaactttcatttagagagagcagatttgaaacactgtttttgtggaatttgcaagtggagatttcaagcgctttggggccaaaggcagaaaaggaaatatcttcgtataacaactagacagaatcattctcagaaactgctgcgtgatgtgtgcgttcaactctcagcagtttaacttttcttttcattcagcggtttggaaacactctgtttgtaaagtctgcacgtggatattttgaccacttagagaccttcgttggaaacgggtttttttcatgtaaggctagacagaagaattcccagtaacttccttgtgttgtgtgcattcaactcacagagttgaacgttcccttagacagagcagatttgaaacactctatttgtgcaatttgcaagtgtagttttcaagctctttgaggtcaacggcagaaaaggaaatatcttcgtttcaaaactagacagaatcattcccacaaactgcgttgtgatgtgttcgttcaactcacagagtttaacctttctgttcatagagcagttaggaaacactctgtttgtaaagtctgtaagtggatattctgacatcttgtggccttcgttggaaacgggatttcttcatattctgctagacagaagaattctcagtaacttccttgtgttgtgtgtattcaactcacagagttgaacgttcctttacacagagcggacttgaaacactctttttgtggaatttgcaagtggagatttcagccgctttgaggtcaatggtagaaaaggaaatatcttcctataaaaactagacagaatgattctcagaaactcctttgtgatgtgtgcgttcaacacacagagttaaacttttcttttcatagagcagttaggaaacactctgtttgtaaagtctgcaagtggatattcagacctctttgaggccttcgttggaaacgagatttcttcatattatgctagacagaagaattctcagtaactttcttgtgttgtgtgtattcaactgtgagagttgaactttcatttagagagaccagatttgaaacactgtttttgtggaatttgcaagtggagatttcaagcgctttggggccaaaggcagaaaaggaaatatcttcgtataaaaactagacagaatcattctcagaaactgctctgcgatgtgtgcgttcaactctcagagtttaaatttgcttttcattcagcagttcggaaacactctgtttgtaaagtctgcacgtggataatttgaccacttagaggccttcgttggaaacgggtttttttcatgtaaggctagacagaagaattcccagtaacttccttgtgttgtgtgcattcaactcacagagttgaacgttcccttagagcagatttgaaacactctatttgtgcaatttgcaagtgtagatttcgagcgctttaaggtcaatggcagaaaaggaaatatcttcgtttcaaaactagacagaatcattcccacaaactgcgttgtgatgtgttcgttcaactcacggagtttaacctttctgttcatagagcagttaggaaacactctgtttgtaaagtctgcaagtggatattcagacctccttgaggccttcgttggaaacgggatttcttcatattctgctagacagaataattctcagtaacttccttgtgttgtgtgtattcaactcacagacttgaacaatcctttacacagagccgacttgaaacactctttttgtggaatttgcaagtggagatttcagccgctttgaggtcaatggtagaaaaggaaacatctccgtataaagactagacagaatgattctcagaaaatcctttgtgatgtgtgcgttcaactcacagagtttaacttttcttttcatagagcagttaggaaacactctgtttgtaaagtctgcaagtggatattcagatctctttgaggccttcgttggaaacgggatttcttcatattctgctagacagaagaattcccagtaacttccttgtgttgtgtgtgttcaactcacagagatgaactctcatttacacagagcagagttgaaacactctttttgtggaatttgcaagtggagatttcaagcgctttgaggccaaaggcagaaaaggaaatatcttcgtataaaaactagacagaatcattctcagaaactgctctgtgatgtgtgcgttcaactctcagagtttaacttttcttttcattcagcagtttggaaacactctgtttgtaaagtctgcacgtggatattttgaccacttagaggccttcgttggaaacgggtttttttcatgtaagggtagacagaagaattcccagtaacttccttgtgttgtgtgcattcaactcacagagttgaacgttcccttagacagagcagatttgaaacactctatttgtgcaatttacaagtgtagatttcaagcgctttaaggtcaacggcagaaaaggaaatatcttcgtttcaaaactagacagaatcattcccacaaactgcgttgtgatgtgttcgttcaactcacagagtttaacctttctgttcatagagcagttaggaaacactctgtttgtaaagtctgcaagtggatattcagacctcctagaggccttcgttggaaacgggatttcttcatattctgctagacagaagaattctcagtaacttcattgtgttgtgtgtattcaactcacagatttcaacgatcctttacacagagcagacttgaaacactctttttgtggaatttgcaattggagatttcagccgctttgaggtcaatggtagaataggaaatatcttcctatagaaactagacagaatgattctcataaactcctttgtgatgtgtgcgttgaactcacagagtttaacctttcttttcatacagcagttaggaaacactctgtctataaagtctgcaagtggatattcagacccctttgaggccttcgttggaaacgggatttcttcatattatgctagacagaagaattctcactaacttccttgtgttgtgtgtattcaactgacagagttgaactttcatttagagagagcagatttgaaacactgtttttgtggaatttgcaagtggagacttcaagcgctttggggccaaaggcagaaaaggaaatatcttcgtataaaaactagacagaatcattctcagaaactgctctgcgatgtgtgcgttcaactctcagagtttaacttttcttttcattcagcagtttggaaacactctgtttgtaaagtctgcacgtgcataatttgaccacttagaggccttcgttggaaacgggtttttttcatgtaaggctagacagaagaattctcagtaactaccttgtgttgtgtgtattcaactcacagagttgaacgatcctttacacagagcagacttgtaacactctttttgtggaatttgcaagtggagatttcagccgctttgaagtcaaaggtagaaaaggaaatatcttcctataaaaactagacagaatcattcccacaaactgctttgtgatgtgttcgttcaactcacagagtttaacctttcttttcatagagcagttaggaaacagctctgtttgtaaattctgtaagtggatattctgacatcttgtggccttcgttggaaacgggatttcttcatattctgctagacagaagaattctcagtaacttccttgtgttgtgtgtattcaactcacagagttgaacgatcctttacacagagcagacttgaaacactctttttgtggaatttgctagtggagatttcagccgctttgaggtcaatagtagaaaaggaaatatcttcgtagaaaaactagacagaatgattctcagaaacttcattgtgatgtgtgcgatcaactcacagagtttaacctttcttttcatagagcagttaggaaacactctgtttgtaaactctgcaagtggatattcagtcctctttgaggccttcgttggaaacgggatttcttcatactgtgctagacagagaattcccagtaacttccttgtgttgtgtgtgttcaactcacagagttgaactttcatttacacagagcagatttgaaacactctttttgtggaatttgcaagtggagatttcaagcgctttgaggccaaaggcagaaaaggaaatatcttcgtataaaaactagacagaatcattctcagaagctgctctgcgatgtgtgcgttcaactctcagagtttaacttttcttttcattcagcagtttggaaacactctgtttgtaaagtctgcacgtggatattttgaccacttagaggccttcgttggaaacgggtttttttcctgtaaggctagacagaagaattcccagtaacttccttgtgttgtgtacattcaactcacagagttgaacgttcccttagacagagcagatttgaaacactctttttgtgcaattggcaagtggagatttcaagcgctttgaggtcaatggcagaaaaggaaatatcttcgtttcaaaactagacagaatcattcccacaaactgcgttgtgatgtgttcgttcaactcacagagtttaaccttgcttttcatagagcagttaggaaacagtctgtttgtaaattctgtaagtggatattctgacatcttgtggccttccttggaaacgggatttcttcatattctgctagacagaagaattgtcagtaacttccttgtgttgtgtgtattcaactcacagagttgaacgatcctttacagagagcagacttgaaacactctttttgtggaatttgcaagtggagatttcagccgctttgaggtcaatagtagaaaaggaaatatcttcgtagaaaaactagacagaatgattctcagaaactcctttgtgatgtgtgcgttcaactcacagagtttaacctttcttttcatagagcagttaggaaacactccgtttgtaaagtctgcaagtggatattcagacctctttgaggccttcgttggaaacgggttttttccatataaggctagacagaagaattctcagtaacttccttgtgttgtgtgtattcaactgacagagttgaacgttcatttagagagagcagatttgaaacactgtttttgtggaatttgcaattggagatttcaagcgctttggggccaaaggcagaaaaggaaatatcttcgtataaaaactagacagaatcattctcagaaactgctctgtgatgtgtgcgttcaactctcagagtttaacttttcttttcattcagcactttggaaacactctgtttgtaaagtctgcacgtggatattttgaccacttagaggccttcgttggaaacgggtttttttcctgtaaggctagacagaagaattcccagtaacttccttgtgttgtgtgcattcaactcacagagatgaacgttcccttagacagagcagatttgaaacactctatttgtgcaatttgcaagtgtagatttcaagcgctttaaggtcaacggcagaaaaggaaatatcttcgtttcaaaactagacagaatgattctcagaaactcctttgtgatgtgtgcgttcaactcacagactttaacctttcttttcatagagcagttaggaaacactctgtttgtaaagtctgcaagtggatattcagacatccttgaggctttcgttggaaacgggatttcttcatattctgctagaaagatgaattctcagtaacttccttgtgttgtgtgtattcaactcacagagttgaacgatcctttacacagagcagatttgaaacactgtttttctggaatttgcaagtggagatttcagccgctttgaggtcaatggtagaaaaggaaatatctacgtataaaaactagacagaatgattctcagaaactcctttgtgatgtgtgcgttcaactcacagagttcaaactttcttttcatagagcagttgggaaacactctgtttgtaaagtctgcaagtggatattcagacttctttgaggccttcgttggaagcgggatttcttcatattatgctagacagaagaattcccagtaacttccttgtgttgtgtgtgttcaactcacagagttgaactttcatttacacagagcagatttgaaacactctttttgaggaatttgcaaatggagatttcaagcgctttgaggccaaaggcagaaaatgaaatatcgtcgtataaaaactagacagaatcattctcagaaactgctctgcgatgtgtgcgttcaactctcagagtttaacttttcttttcattcagcagtttggaaacactctgtttgtaaagtgtgcacgtggatattttgaccacttagaggccttcgttggaaacgggtttttttcctgtaaggctagacagaagaattcccagtaacttccttgtgttgtgtacattcaactcacagagttgaacgttcccttagacagagcagatttgaaacactctttttgtgcaattggcaagtggagatttcaagcgctttaaggtcaatggcagaaaaggaaatatcttcgtttcaaaactaggcagaatcattcccacaaactgcgttgtgatgtgttcgttcaactcacagagtttaacctttctgttcatagagcagttaggaaacactctgtaaagtctgtaagtggatattctgacatcttgtggccttcgttggaaacgggatttcttcatattctgctagacagaagaattctcagtaacttccttgtgttgtgtgtattcaactcacagagttgaactatcctttacacagagcagacttgtaacactctttttgtggaatttgcaagtggagatttcagccgctttgaagtcaaaggtagaaaaggaaatatcttcctataaaaactagacagaatgattctcagaaactcctttgtgatgtgtgcgttcaactcacagagtttaacttttcttttcatagagcagttgggaaacactctgtttgtaaagtctgcaagtggatattcagacctctttgaggccttcgttggaaacgggattttttcatattatgctagacagaagaattccgagtaacttccttgtgttgtgtgtgttcaactcacagagttgaactttcatttacacagagcagatttgaaacactctttttgtggaatttgcaagtggagatttcaagcgctttgaggccaaaggcagaaaaggaaatatactccgtttcaaaactagacagaatcattctcagaaaccgctctgtgatgtgtgcattcaactctcagagtttaacttttcttttcattcagcagtttggaaacactctgtttgtaaagtctgcacgtggatattttgaccacttagacgccttcttttgaaacgggttttttttcatgtaaggctagacagaagcaattcccagtaacttccttgtgttgtgtacattcaactcacagagttgaacgttaccttagacagagcagatttgaaacactctttttgtgcaattggcaaatggagatttcaagcgctttaaggtcaatggcagaaaaggaaatatcttcgtttcaaaactagacagaatcattcccacaaactgcgttgtgatgtgttcgttcaactcacagagtttaacctttcttttcatagagcagttaggaaacagtctgtttgtcaattctgtaagtggatattctgacatcttgtggccttctttggaaacgggatttcttcatattctgctagacagaagaattctcagtaacttccttgtgttgtgtgtattcaactcacagcaatttaacgatcctttacacagagcagacttgaaacactctttttgtggaatttgcaagtggagatttcagccgctttgtggtcaatgatagaaaaggaaatatcttcgtataaaaactagacagaatgattctcagaaactcctttgtgatgtgtgcgttcaactcacagagtttaacctttcttttcatagagcagttaggaaacactctgtttgtaaagtctgcaagtagatattcagacatctttgaggctttcgttggaaacgggatttcttcatattctgctagacagaagaattcccagtaacttccttgtgttgtgtgtgttcaacttcacagagttgaactttcatttacacagagcagatttgaaacactctttttgtggaatttgcaagtggagatttcaagcgctttgaggccaaaggcagaaaaggaaatatcttcgtttcaaaactagacagaatcattctcagaaactgctgcgtgatgtgtgcgttcaactctcagagtttaacttttcttttcattcagcggtttggaaacactgtgtttgtaaagtctgcacgtggatattttgaccacttacaggccttcgttggaaacgggtttttttcatgtaaggctagacagaagaattcccagtaacttccttgtgttgtgtacattcaactcacagagttgaacgttcccttagacagagcagatttgaaacactctttttgtgcaattggcaaatggagatttcaagcgctttaagttcaatggcagaaaaggaaatatcttcgtttcaaaactagacagaatgattctcagaaactcctttgtgatgtgtgcgttcaactcacagagtttaacctttcttttcatagagcagttaggaaacactctgtttgtgaagtctgcaagtggatattcagacctccttgaggccttcgttggaaacgggatttcttcatattctgctagacagaagaattctcagtaacttccttgtgttgtgtgtattcaactcacagagttgaacgatcctttacacagagcagacttgaaacactctttttgtggaatttgcaagtggagatttcagccgctgtgagttcaatggtagaataggaaatatcttcctatagaaagtagacagaatgattctcagaaactcctttgtgatgtgtgcgttcaactcacagagtttaacctttcttttcatagagcagttaggaaacactctgtttgtaaagtctgcaagtggatattctgacctccttgaggcgttcgttggaaaagggatttcttcatattctgctagacagaatcatactcagaaactgctctgcgatgtgtgcgttcaactctcagagtttaacttttcttttcattcagcagtttggaaacactctgtttgtgaagtctgcacgtggatattttgaccacttagtggccttcgttggaaacggttttttttcctgtaaggctagacagaagaattcccagtaacttccttgtgttgtgtacattcaactcacagagttgaacgttcccttagacagagcagatttgaaacactctttttgtgcaattggcaagtggtgatttcagccgctttgaggtcaatgatagaaaaggaaatatcttcgtataataactagacagaatgattctcagaaacttcattgtgatgtgtgcgttcaactcacagagtttaacctttcttttcatagagcagttaggaaacactctgtctgtaaagtctgcaagtggatattcagacctctttgaggccttcgttggaaacgggtttttttcatataaggctagacagaagaattctcagtaacttccttgttttgtgtgaattcacctcacagatttgaacgatcctttacacagagcagacttgaaacactctttttgtggaatttggaagtggagatttcagccgctttgtggtcaatagtagaataggaaatatcttcctatagaaactagacagaatgattctcagaaactcctttgtgatgtgtgcgttcaactcacagagtttaacctttcttttcatagagcagttaggaaacactctgtttttaaagtctgcaagtgtatattcagacatccttgaggctttcgttgcaaacgggatttcttcatattctgctagaaagaagaattctcagaaacttccctgtgttgtgtgaattcaactcacagagttgaacgatcctttacacagagcagacttgaaacactctttttgtggaatttgcaagtagagatttcagccgctttgaggtcaatggtagaatagggaatatcttcctatagaaactagacagaatgattctcagaatctcctttgtgatgtgtgcgttcaactcacagagtttaacctttcttttcatagagcagttgggaaacactctgtttgtaaagtctgcaagtggatattcagacatccttgaggctttcgttggaaacgggatttcttcatattctgctagaaagaagaattttcagaaacttccttgtgttgtgtgtattcaactcacagagttgaacgatcatttacacagagcagacttgagacactctttttgtggaatttgtaagtggagatttcagccgctttgaggtcaatggtagaaaaggaaatatcttcgtataaaaactagacagaatgattctcagaaactcctttgtgatgtgtgcgttcaactcacagagtttaacctttcttttcatagagcagttaggaaacactctgtttgcaaagtctgcaagtggatattcagacctctttgaggccttcgttggaaacggttttttttcatataaggctagacagaagaattctcagtaacttccttgtgttgtgtgtattcaactgacagatttgaactttcatttagagagagcagatttgaaacactgtttttgtggaatttgcaagtggagatttcaagcgctttggggccaaaggcagaaaaggaaatatcttcgtataaaaactagacagaatcattctcagaaactgctctgcgatgtgtgcgttcaactctcagagtttaacttttcttttcattcagcagtttggaaacactctgtttgcaaagtctgcacgtggatattttgaccacttagaggccttcgttggaaacgggtttttttcatgtaaggctagacagaagaattcccagtaacttccttgtgttgtgtacattcaactcacagagttgaacgttcccttagacaggagcagatttgaaacactctttttgtgcaattggcaagtggtgatttcagccgctttgaggtcaatggtagaaaaggaaatatcttcgtataaaaactagacagaatgattctgagaaactcctttgtgatgtgtgcgttcaactcacagagttcaacctttcttttcatagagcagttgggaaacactctgtttgtaaattctgcaaatgcatattcagacttctttgaggccttcgttggaagcgggatttcttcatattctgctagacagaagaattctcagaaacttcgatgtgttgtgtgttttcaaatcacagagttcaacgatcctttacacagagtagacttgaaacactctttttgtggaattggcagggtggagatttcagccgctttgaggtcaatggtagaaaaggaaatatcttcgtataaaaactagacagaatgattctcagaaacttctttgtgatgtgtgcgttcaactcacagagtttaacctttcttttcatagagcagttaggaaacactctgtttgtaaagtctgcaagtggatattcagacctctttgaggccttcgttggaaacgggtttttttcatataaggctagacagaagaattcccagtaacttccttgtgttgtgtgtgttcaactcacagcagttgaactttcatttacacagagcagatttgaaacactctttttgtggaatttgcaagtggagatttcaagcgctttgaggccaaaggcagaaaaggaaatatcttcgtataaaaactagacagaatcattctcagaaactgctctgcgatgtgtgcgttcaactctcagagtttaagttttcttttcattcagcagtttggaaacactctgtttgtaaagtctgcacgtggatattttgaccacttagaggccttcgttggaaacgggtttctttcctgtaaggctagacagaagaattcccagtaacttccttgtgttgtgtgcattcaactcacagagttgaacgttcccttagacagagcagatttgaaacagcctatttgtgcaatttgcaagtgtagatttcaagcgctttaaggtcaacggctgaaaaggaaatatcttcgtttcaaaactagacagaaatcattcccacaaactgcgttgtgatgtgttcgttcaactcacagagtttaacctttctgttcatagagcagttaggaaacactctgtttgtaaagtctgcaagtggatattcagacctccttgaggccttcgttggaaacgggatttcttcatattctgctagacagaataattctcagtaacttccttgtgttgtgtgtattcaactcacagagttgaaggatcctttacagagagctggcttgcaacactctttttgtcgaatttgcaagtggagatttcagccgctttgaggtcaatggtagaataggaaatatcttcttatagaaactagacagaatgattctcagaaactcctttgtgatgtgtgtgttcaactcacagagtttaacctttcttttcctagagcagttagtaaacactctgtttataaagtctgcaagtggatattcagacccctttgaggccttcgttggaaacgggatttcttcatattattctagacagaagaattctcagtaacttccttgtgttgtgtgtattcaactcacagagttgaactttcatttagagagagcagatttgaaacactgtttttgtggaatttgcaagtggtgacttcaagcgctttggggccaaacgcagaaaaggaaatatcttcgtataaaaactagacagaaatcattctcataaactgctgcgtgatgtgtgcgttcaactctcagagtttaacttttcttttcattcagcggtttggaaacactctgtttgtaaagtttgcacgtggatattttgaccacttagaggccttcgttggaaacgggtttttttcatgtaaggctagacagaagaattcccaggaacttccttgtgttgtgtacattcaactcacagagttgaacgttcccttagacagagcagatttgaaacactctttttgtgcaattggcaaatggagatttcaagcgctttaaggtcaatggcagaaaaggaaatatcttcgtttcaaaactatacagaatcattcccacaaactgcgttgtgatgtgtgcgttcaactcaaagagtttaacctttcttttcatagagcagttaggaaacactctgtttgtaaagtctgcaagtggatattcagacctccttgaagccttcgttggaaacgggatttcttcatattctgctagacagaagaattctcagaaacttccttctgttgtgtgtattcaactcacagagttgaacgatcgtttacacagagcagacttgagacactctttttgtggaatttgtaagtggagatttcagccgctttgaggtcaatggtagaaaaggaaatatcttcatataaaaactagacagaatgattctcagaaactcctttgtgatgtgtgcgttcaactcacagagttcaacctttcttttcatagagcagttgggaaacactctgtttgtaaagtctgcaagtggatattcagacttctttgaggccttcgttggaagcgggatttcttcatgttcagctagacagaagaattctcagaaacttccttgtgttgtgtgtattcaactcacagagttgaacgatcctttacacagagcagacttgaaacactccttttgtggaatttgcaagtggagatttcagccgctttgaggtcaatggtagaataggaaatatcttcctatagaaactagacagaatcattctcagaaactgctctgcgatgtgtgcgttcaactctcagtgtttaacttttcttttcattcagcagtttggaaacactctgtttgtaaagtctgcacgtggataacttgaccacttagaggcctttgttggaaacgggtttttttcatgtaaggctagacagaagaattctcagtaacttccttgtgttgtgtgtattcaactcacagagttgaacgatcctttacacagagcagacttttaacactctttttgtggaatttgcaagtggagatttcagccactttgaagtcaaaggtagaaaaggaaataacttcctataaaaactagacagaatgattctcagaaactcctttgtgatgtgtgcgttcaactcacagagtttcacctttcttttcatagagcagataggaaacactctgtttgtaaagtctgcaagtggatattcagacatccttgaggctttcgttggaaacgggatttcttcatattctgctagaaagaagaattctcagtaacttccttgtgttgtgtgtattcaactcacagagttgaacgatcctttacactcagcagacttgaaacactctttttgtggaatttgcaagtggagatttcagccgctttgaggtcaatggtagaataggaaatatcttcctatagaaactagacagaatgattctcagaaactcctttgtgatgtgtgtgttcaactcacagagtttaacctttcttttcatagagcagttaggaaacactctgtttgtaaagtctgcaagtggatattcagacctctttgaggccttcgttggaaacgcgtttttttcatataaggctagacagaagaattcccagtaacttccttgtgttgtgtgtgttcaagtcacagagttgaactttcctttacacagagaagatttgaaacactctttttgtggaatttgcaagtggagatttcaagcgctttgaggccaaaggcagaaaaggaaatatcttcgtttcaaaactagacagaatcattctcagaaactgctgcgtgatgtgtgcgttcaactctcagagtttaacttttcttttcattcagcggtttggaaacactctgtttgtaaagtctgcacgtggacactttgaccacttagaggccttctttggaaacgggttttttttatttaaggctagacagaagaattcccagtaacttccttgtgttgtgtgcattcaactcacagagttgaacgttcccttagacagagcagatttgaaacactctatttgtgcaatttgcaagtgtagatttcaagcgctttaaggtcaatggcagaaaaggaaatattttcgtttcaaaactagacagaatcattctcagaaactcctttgtgatgtgtgcgtttaactcacagagtttaacctttcttttcatagagcagttaggaaacactctgtttgtaaagtctgcaagtggatattcagacctctttgaggccttcgttggaaacgggatttcttcatattctgctagacagaagaattcttagtaacttccttgggttgtgtgtattcaactcacagagtggaacgatcctttacacagagcagacttgaaacactctttttgtggaatttgcaagtggagatttcagccgctttgaggtcaatggtagaaaaggaaatatcttcgtataaaaactagacagataatgattctcagaaagtcctttgtgatgtgtgtgttcaaatcacagagtttaacctttcttttcatagagcagttagtaaacactctgtttataaagtctgcaagtggataatcagacccctttgaggccttcgttggaaacgggatttcctcatattatgctagacagaagaattcccagtaacttccttgtgttgtgtgtgttcaactcacagagttgaactttcatttacacagagcagattggaaacactctttttgtggaatttgcaagtggagatttcaagcgctttgaggccaaaggcagaaaaggaaatatcttcatataaaaactagacagaatcattctcagaaactgctctgcgatgtgtgcgatcaactctcagagtttaacttttcttttcattcagcagtttggaaacactctgtttgtaaagtctgcacgtggatattttgaccacttagaggccttcgttggaaacgggtttctttcctgtaaggctagacagaagaattcacagtaagttccttgtgttgtgtgcattcacctcacagggttgaaggttcctttagacagagcagattggaaacactctttttgtgcaatttgcaagtggagatttcaagcgctttaaggtcaatggcagaaaaggaaatatcttcgtttcaaaactagacagaatcattcccacaaactgcgttgtgatgtgtgagttcaagtcaaagagtttaacctttcttttcatagagcagttaggaaacactctgtttgtaaagtctgcaagtggatattcagacctccttgaggccttcgttggaaacgggatttcttcatattctgctagacagaagaattctcagtaacttccttgtgttgtgtgtattcaactcacagagttgaacgatcctttacacagagcagacttgaaacactctttttgtggagtttgcaagtggagatttcagccgctttgaggtcaatagtagaaaaggaaatatcttcgtagaaaaactagacagaatgattctcagaaactccttagtgatgtgtgtgtccaactcacagggtttaacctttcttttcatagagcagttagcaaacactctgtttgtaaagtctgcaagaggatattcagacctctttgaggccttcgttggaaacgggtttttttcatataaggctagacagaagaattcccagtaacttccttgtgttgtgtgtgttcaactcacacagttgaactttcatttacagagagcagatttgaaacactctttttgtggaatttgcaaatggagatttcaagcgctttgaggccaaaggcagaaaaggaaatatcttcgtataaaaactagacagaatcattctcagaaactgctgcgtgatgtgtgcgttcaactctcagagtttaacttttcttttcattcagcggtttggaaacacactgtttgtaaagtctgcacgtggatattttgaccacttagaggccttcgttggaaacgggattttttcatgtaaggctagacagaagaattcccagtaatttccttgtgttgtgtgcattcagctcacagagttgaacgttcccttagacagagcagatttgaaacactctatttgtgcaatttgcaagtgtagatttcaagcgctttaaggtcaatggcagaaaaggaaatatcttcgtttcaaaactagacagaatcattcccacaaactgcgttgtgatgtgttcgttcaactcacagagtttaacctttctgttcatagagcagttaggaaacactctgtttgtaaagtctgcaagtggatattcagacctctttgaggccttcgttggaaacgggatttcttcatatgatgctagacagaagaattctcagtaacttccttgtgttgtgtgtattcaacttacagagttgaccgatcctttacacagagcagacttgtaacactctttttgtggaatttgcaagtggagatttcagccgctttgaagtcaaaggtagaaaaggaaatatcttcctataaaaactagacagaatgattctcagaaactcctttgtgatgtgtgtgttcaactcacagagtttaacctttcttttcatagagcagttaggaaacactctgtttctaaagtctgcaagtggatattcagacctctttgaggtcttcgttggaaacgggtttttttcatataaggctagacagaagaattcccagtaacttccttgtgttgtgtgtgttcaactcacagtgttgaactttcatttacacagagcagatttgaaacactctttttgtggaatttgcaagtggagatttcaagcgctgtgaggccaaaggcagaaaaggaaatatcttcgtataaaaactagacagaatcattctcagaaactgctctgcgatgtgtgcgttcaactctcagagtttaactttgcttttcattcagcagtttggaaacactctgtttctaaagtctgcacgtggataatttgaccacttagaggccttcgttggaaacgggtttttttcctgtaaggctagacagaagaattcccagtaacttccttgtgttgtgtgcattcaactcacagagttgaacgttcccttagacagagcagatttgaaacactctatttgtgcaatttgcaagtgtatatttcaagcgctttaaggtcaaaggcagaaaaggaaatatcttcgtttcaaaactagacagaatcattcccacaaactgcgttgtgatgtgttcgttcaactcacagagtttaacctttctgttcatagagcagttaggaaacactctgtttgtaaagtatgcaagtggatattcagacctccttgaggccttcattggaaacgggatttcttcatattctgctagactgaagaattctcagtaacttccttgtgttgtgtgtattcaactcacagagttgaacgatcctttacacagagcagacttgaaacactctttttgtggaatttgcaagtggagatttcagccgctttgaggtcaatagtagaaaaagaaatatcttcgtagaaaaactagacagaatgattctcagaaactcctttgtgatgtgtgcgttcaactcacagagtttaacctttctgttcatagagcagttaggaaacactctgtttgtaaagtctgcaagtggatattcagacctccttgaggccttcgttggaaacggtatttcttcatattctgctagacagaagaattctcagtcacttccttgtgttgtgtgtattcaactgacagagttgaactttcatttagagagagcagatttgaatcactgtttttgtggaatttgcaagtggagatttcaagcgctttggggccaaaggcagaaaaggatatatcttcgtataaaaactggacagaatcattctcagaaactgctctgcgatgtgtgcgttcaactctcagagtttaacttttcttttcattcagcagtttggaaacactctgtttgtaaagtctgcacgtggataacttgaccacttagaggccttcgttggaaacgggtttttttcatgtaaggctatacagaagaattcccagtaacttccttgtgttgtgtacattcaactcacagagttgaacgttcccttagacagagcagatttgaaacactctttttgtgcaattggcaaatggagatttcaagcgctttaagttcaaaggcagaaaaggaaatatcttcgtttcaaaactagacagaatcattcccacaaactgcgttgtgatgtgttcgttcaactcacagagtttaacctttctgttcatagagcagttaggaaacactctgtttgtaaagtctgtaagtggatattcagacatcttgtggccttcgttggaaacgggatttcttcatattctgctagacagaagaattctcagtaacttccttgtgttgtgtgtattcatcttacagagttgaacgatcctttacacagagcagacttgtaaaactctttttgtggaatttgcaagtggagatttcagccgctttgaagtcaaaggtagaaaaggaaatatcttcctataaaaactagacagaacgattctcagaaactcctttgtgatgtgtgcgttcaactcacagagtttaacctttcttttcatagagcagttaggaaacagtctgtttgtaaagtctgcaagtggatattcagacccctttgaggccttcgttggaaacgggatttcttcctattctgctagacagaagaattcccagtaacttccttgtgttgtgtgtgttcaactcacagagttgaactttcatttacacagagcagatttgaaacactctttttgtggaatttgcaaatggagatttcaagcgctttgcggccaaaggcagaaaaggaaatatcttcgtataaaaactagacagaatcattctcagaaactgctctgcgatgtgtgcgttcaactctcagagtttaacttttcttttcattcagcagtttggaaacactcggtttgtaaagtctgcacgtggatattttgaccacttagaggccttcgttggaaacgggtttttttcctgtaaggctagacagaagaattctcagtaacttccttgtgttgtgtgtattcaactcacagagttgaacgatcctttacacagagcagacttgtaacactctttttgtggaatttgaaagtggagatttcagccgctttgaagtcaaaggtagaaaaggaaatatcttcctataaaaactagacagaatgattctcagaaactcctttgtgatgtgtgcgttcaactcacagagtttaacttttcttttcatagagcagttaggaaacactcagtttgtaaagtctgcaagtggatattcagacctccttgaggccttcgttggaaaagggatttcctcatattatgctagacagaagaattctcagtaacttccttgtgttgtgtgtattcaactcacagagttgaacgatccttacagagagcagacttgaaacactctttttgtggaatttgcaagtggagatttcatccgctttgaggtcaatggtagaataggaaatatcttcctatagaaactagacagaatgattctcagaaactcctttgtgatgtgtgtgttcaactcacagagtttaacctttcttttcatagagcagttaggaaacactctgtttgtaaagtctgcaagtggatattcagacctctttgaggccttcgttggaaacgggtttttttcatataaggctacacagaagaattcccagtaacttccttgtgttgtgtgtgttcaactcacagagttgaactttcatttacacagagcagatttgaaacactctttttgtggaatttgcaagtggagatttcaagcgctttgaggccaaaggcagaaaaggaaatatcttcgtataaaaattagacagaatcattctcagaaactgctctgcgatgtgtgcgttcaactctcagagtttaacttttcttttcattcagcagtttggaaacactctggttgtaaagtctgcacgtggataacttgaccacttagaggccttcgttggaaacgggtttttttcctgtaaggctagacagaagaattcccaggaacttccttgtgttgtgtacattcaactcacagagttgaacgttcccttagacagagcagatttgaaacactctttttgtacaattggcaagtggtgatttcagccgctttgaggtcaatggtagaaaaggaaatatcttcgtataaaaactagacagaatgattctcagaaacttcattgtgacgtgtgcgttcaactcacagagtttaacctttcttttcatagagcagttaggaaacaccctgtttgtaaagtctgcaagtggatattcagacctctttgaggccttcgttggaaacgggatttcttcatactgtgctagacagaagaattctcagtaacttccttgtgttgtgtgtattcaactcacagagttgaacgatcctttacacagagcagattacaaacactctttttgtggaatttgcaagtggagatttcagccgctttgaggtcaatagtagaaaaggaaatatcttcgtataaaaactagacagaatgattctcagaaacggctttgtgatgtgtgtgttcaactcacagagtttaaccttccttttcatagagcagttagtaaacactctgtttataaagtctgcaagtggatattcagacccctttgaggccttcgttggaaacgggatttcttcatattatgctagacagaagaattcccagtaacttccttgtgttgtgtgtgttcaacccacagagttgaactttcatttacacagagcagatttgaaacactctttttgtggaatttgcaagtggagatgtcaagcgctttgaggccaaaggcagaaaaggaaatatcttcgtttcaaaactagacagaatcattctcagaaactgctctgcgatgtgtgcgttcaactctcagagtttaacttttcttttcattcagcagtttggaaacattctgtttgtaaagtctgcacgtggatattttgaccacttagaggccttcgttggaaacgggtttttttcctgtaaggctagacagaagaattcccagtaacttccttgtgttgtgtacattcaactcacagagttgaacgttcccttagacagagcagatttgaaacactctttttgtgcaattggcaagtggagatttcaagcgctttaaggtcaatggcagaaaaggaaatatcttcgtttgaaaactagacagaatcattcccacaaactgcgttgtgatgtgttcgttcaactcacagagtttaacctttcttttcatagagcagttaggaaacagtctgtttgtcaattctgtaagtggatattctgacatcttgtggcattcgttggaaacgggatttcttcatattactgctagacagaagaattctcagtaacttccttgtgttgtgtgtattcaactcacagagttgaacgatcctttacacagagcagacttgaaacactctttttgtggtatttgcaagtggagatttcagccgctttgaggtcaatggtagaataggaaatatcttcctatagaaactagacagaatgattctcagaaactcctttgtgatgtgtgtgttcaactcacagagttcaacctttcttttaatagagcagttgggaaacactctgtttgtaaagtctgcaagtggatattcagacttctttgaggccttcgttggaaacgggatttcttcatattatgctagacagaagaattctcagtaacttccttgtgttgtgtgtattcaactgacagagttgaactttcatttagagagagcagatttgaaacactgtttttgtggaatttgcaagtggagatttcaagcgctttggggccaaaagcagaaaaggaaatatcttcgtataaaaactagacagaatcattctcagaaactgctctgcgatgtgtgcgttcaactctcagagtttaacttttcttttcattcagcagtttggaaacactctgtttgtaaagtctgcacgtggatattttgacaacttagaggccttcgttggaaacgggtttttttcctgtaaggctagacagaagaattcccagtaaattccttgtgttgtgtgcattcaactcacagagttgaacgttcccttagacagagcagatttgaaacactctatttgtgcaatttgcaagtgtagatttcaagcgctttaaggtcaatggcagaaaaggaaatatcttcgattcaaaactagacagaatcattccctcaaactgcgttgtgatgtgttcgttcaactcacagagtttaacctttcttttcatagagcagttaggaaacagtctgtttgtaaattctgtaagtggatattctgacatcttgtggccttcgttggaaacgggatttcttcatattctgctagacagaagaattctcagtaacttccttgtgttgtgtgtattcaactcacagacttgaacgatcctttacacagagcagacttgtaacactctttttgtggaatttgcaagtggagatttcagccgctttgaagtcaaaggtagaaaaggaaatatcttcctataaaaactagacagaatgattctcagaaactcctttgtgatgtgtgcgttcaactcacagagtttatcttttcttttcatagagcagttaggaaacactctgtttgtaaagtctgcaagtggatattcagacctctttgaggccttcgttggaaacgggatttcttcatattctgctagacagaagaattcccagtaacttccttgtgttgtgtgtgttcaactcacagagttgaactctcatttacacagagcagatttgaaacactctttttgtggaatttgcaagtggagatttcaagcgctttgaggccaaaggcagaaaaggaaatatcttcgtataaaaactagacagaatcattctcagaaaccgctctgtgatgtgtgcgttcaactctcagagtttaacttttcttttcattcagcagtttggaaacactctgtttgtaaagtctccacgtggatattttgaccacttagaagccttcgttggaaacgtgtttttttttcatgtaaggctagacagaagaattcccaggaacttccttgcgttgtgtacattcaactcacagagttgaacgttcccttagacagagcagatttgaaacactctttttgtgcaattggcaagtggagatttcaagcgctttaaggtcaattgcagaaaaggaaatatcttcgtttcaaaactagacagaatgattctcagaaacttctttgtgatgtgtgcgttcaactcacagagtttaacctttcttttcatagagcagttaggaaacactctgtttgtaaactctgcaagtggatattcagacgtctttgaggccttcgttggaaacgggatttcttcatactgtgctagacagaagaattctcagtaacttcattgtgttgtgtgtattcaactcacagatttcaacgatcctttacacagagcagacttgaaacactctttttctggaatttgcaattggagatttcagccgctttgaggtcaatggtagaataggaaatatcttcctatagaaactagacagaatgattctcagaaactcctttgtgatgtgtgtgttcaactcacagattttaacctttcttttcatagagcagttagtaaacactctgtttataaagtctgcaagtggatattcagacccctttgaggccttcgttggaaacgggatttcttcatattctgctagacagaagaattctcagtaacttccttgtgttgtgtgtagtcaactcacagagttgaacgatcctttacagagagcagacttgaaacactctttttgtggaatttgcaagtggagatttcagccgctttgaggtcaatggaagaaaaggaaactatcttcgtataaagactagacagaatcattctcagaaactgctctgcgatgtgtgcgttcaactctcagagtttaacctttcttttcattcagcagttgggaaacactctgtttgtaaagtctgcacgtggataacttgaccacttagaggccttcgttggaaacgggtttttttcatgtaaggctagacagaagaattctcagtaacttccttgtgttgtgtgtattcaactcacagagttgaacgatcctttacacagagcagacttgtaacactctttttgtggaatttgcaagtggagatttcagccgctttgaagtcaaagttagaaaaggaaataacttcctataaaaactagacagaatcattcccacaaactgcgttgtgatgtgttcgttcaactcacagagtttaacctttcttttcatagagcagttaggaaacagtctgtttgtcaattctgtaagtggatattctgacatcttgtggccttcgttggaaacgggatttcttcatattctgctagacggaagaattctcagaatctttccttgtgttgtgtgtattcaactcacagaattgaacgatcctttacacagagcagacttgaaacactctttttgtggaatttgcaagtggagatttcagccgctttgaggtccatggtagaaaaggaaatatcttcgtataaaaactagacagaatgattctcagaaactcctttgtgatgtgtgcgttcaactcacagtttaacctttcttttcatagagcagttaggaaacactctgtttgtaaagtctgcaagtggatattcagacatctttgaggctttcgttggaaacggaatttcttcatattctgctagacagaagaattctcagtaacttccttgtgttgtgtgtattcaactgacagagttgaactttcatttagagagagcagatttgaaacactgtttttgtggaatttggaagtggagatttcaaacgctttggggccaaaggcagaaaagaaaatatattcgtataaaaactagacggaatcattctcagaaactgctgcgtgatgtgtgcgttcaactctcagagtttaacttttcttttcattcagcggtttggaaacactctgtttgtaaagtctgcacgtggatattttgaccacttagaggccttcgttggaaccgggttttttgcatgtaaggctagacagaagaattcccaggaacttccttgtgttgtgtacattcaactcacagagttgaacgttcccttagacagagtagatttgaaacactctttttgtgcaattggcaagtggtgatttcagccgctttgaggtcaatggtagaaaaggaaatatcttcgtataaaaactagacagaatcattcccacaaactgcgctgtgatgtgttcgttcatctcacagagtttaacctttcttttcatagagcagttaggaaacactctgtttgtaaattctgtaagtggatattctgacatcttgtggccttcgttggaaacgggatttcttcatattctgctagacagaagaattctcagaaacttccttgtgttgtgtgttttcaactcacagagttgaaccgatcctttacacagagcagacttgaaacactccttttgtggaatttgcaagtggagatttcagccgctttgaggtcaatggtagaataggaaatatcttcctatagaaagtagacagaatgattctcagaaactcctttgtgatgagtgcgttcaactcacagagtttaacctttcttttcatagagcagttaggaaacactctgtttttaaagtctgcacgtggatattttgacctctttgaggccttccttggaaacgggattttttcatataaggctagacagaagaattctcagtaacttccttgtgttgtgtgtattcaactgacagagttgaactttcatttagaccgagcagatttgaaacactatttatgtggaattggcaattggagatttcaagctctttgaggccaaaggcagaaaaggaaatatcttcgtttcaaaactagacagaatcattctcagaaactgctctgcgatgtgtgcgttgaactctcagagtttaacttttcttttcattcagcagtttggaaacactctgtttgtaaagtctgcacgtggatattttgaccacttagaggccttcgttggaaacgggtttttttcctgtaaggctagacagaagaattcccagtaacttccttgtgttgtgtgcattcaactcacagagttgaacgttcccttagacagagcagatttgaaacactctatttgtgcaatttgcaagtgtagatttcaagcgctttatggtcaacggcagaaaaggaaatatcttcgtttcaaaactagacagaatcattcccacaaactgcgttgtgatgtgttcgttcaactcacagagtttaacctttctgttcatagaacagttaggaaacactctgtaaagtctgtaagtggatattctgacatcttgtggccttcgttggaaacgggatttcttcatattctgctagacagaagaattctcagtaacttccttgggttgtgtgtattcaactcaccgagttgaaggatcctttacagagagcaggcttgaaacactctttttgtcgaatttgcaagtggagatttcagccgctttgaggtcaatggtagaataggaaatatcttcatataaagactagacagaatgattctcagaaactcctttgtgatgtgtgcgttcaactcacagagtttaacttttcttttcatagagcagttaggaaacactctgtttgtaaagtctgcaagtggatattccgacctctttgaggccttcgttggaaacgggatttcttcatattatgctggacagaagaattctcagtaacttccttgtgttgtgtgtattcaactgacagagttgaactttcatttagagagagcacatttgaaacactgtttttgtggaatttgcaagtggagatttcaagcgctttggggccaaaggcagaaaaggaaatatcttcgtataaaaactagacagaatcattctcagaaactgctgcgtgatgtgtgcgttcaactctcagagtttaacttttcttttcattcagcggtttggaaacactgtgtttgtaaagtctgcacgtggatattttgaccacttagaggccttcgttggaaacgggtttttttcatgtaaggctagacagaagaattcccagtaacttccttgtgttgtgtgcattccactcacagagttgaacgttcccttagacagagcagatttgaaacactctatttgtgcaatttgcaagtgtagatttcaagcgctttaaggtcaatggcagaaaaggaaatatcttcgtttcaaaactagacagaatcattcccacaaactgcgttgtgatgtgttcgttcaagtcacagagtttaacctttcttttcatagagcagttaggaaacagtctgtttgtcaattctgtaagtggatattctgacatcttgtggccttcgttggaaacgggatttcttcatattctgctagacagaagaattctcagtaacttccttgtgttgtgtgaattcaactcacagagttgaacgatcctttacacagagcagacttgaaacactgtttttgtggaatttgccagtggagatttcagccgctttgaggtcaatggtagaataggaaatatcttcctatagaaactagacagaatgattctcagaaactcctttgtgatgtgtgcgttcaactcacagagtttaaccttttttttcatagagcagttaggaaacactctgtttgtaaagtctgcaagtggatattcagacctctttgaggccttcgttggaaacgggttttttacatataaggctaaacagaagaattcccagtaacttccttgtgttgtgtgtgttcaactcacagagttgaactttcatttacccagagcagatttgaaacactctttttgtggaatttgcaagtggagatttcaagcgctttgaggctaaaggcagaaaaggaaatatcttcgtttcaaaactagacagaatcattctcagaaactgctctgcgatgtgtgcgttcaactctcagagtttaacttttcttttcattcagcagtttggaaacactctgtttgtaaagtctgcacgtggatattttgatagaggctttcgttggaaacgggtttttttcttgtaaggctagaaagaagaattcccagtaacttccttgtgttgtgtgcattcaactcacagagttgaacgttcccttagacagagcagatttgaaacactctatttgtccaatttgcaagtgtagatttcaagcgctttaaggtcaacggcagaaaaggaaatatcttcgtttcaaaactagacagaatgattctcagaaactcctttgtgatgtgtgcgttcaactcacagagtttaacctttcttttcatagagcagttaggaaacactctgtttgtaaagtctgcaagtggatattcacacctccttgaggccttcgttggaaacgggatttcttcacattctgctagacagaagaattctcagtaacttccttgtgttgtgtgtattcaactcactgagttgaacgatcctttacacagagcagacttgaaacactctttttgtggaatttgcaagtggagatttcagccgctttgaggtcaatggtagaaaaggaaactattttcgtataaagactagacagaatgattctcagaaactcctttgtgatgtgtgcgttcaactcacagagtttaacctttcttttcatagagcagttaggaaacactctgtttgtaaagtctgcacgtggatatttggacttctttgaggccttcgttggaaacggggtattttcatgtaaggctagacagaagaattcccagtaacttccttgtgttttgtgtgttcaactcacagagttgaactttcatttacacagagcagatttgaaacactctttttgtggaatttgcaaatggagatttcaagcgctttgaggccaaaggcagaaaaggaaatatcttcgtataaaaactagacagaatcattcccagaaactgctctgcgatgtgtgcgttcaactctcagagtttaacttttcttttcattcagcagtttggaaacactctgtttgtaaagtctgcacgtggatattttgaccatttagaggccttcgttggaaacgggtttttttcttgtaaggctagacagaagaattcccagtaacttccttgtgttgtgtacattcaactcacagagttgaacgttcccttagacagagcagatttgaaacactctttttgtgcaattggcaagtggagatttcaagcgctttgaggtcaatggcagaaaaggaaatatcttcgtttcaaaactagacagaatcattcccacaaactgcgttgtgatgtgttcgttcaactcacagagtttaacctttctgttcatagagcagttaggaaacactctgtttgtaaagtctgtaagtggatattctgacatcttgtggccttcgttggaaacgggatttcttcatattctgctagagagaagaatactcagtaacatccgcgtgttgtgtgtattcaactcagagagttgaacgatcctttacacagagcagacttgaaacactctttttgtggaatttgcaagtggagatttcagccgctttgaagtcaatggtagaaaaggaaatatcttcctataaaaactagacagaatgattctcagaaacttcattgtgatgtgtgcgttcaactcacagagtttaacctttcttttcatagaacagttaggaaacactctgtttgtaaactctgcaagtggatattcagacctctttgaggccttcgttggaaacgggttttttcatgtaaggctagacagaagaattctcagtaacttccttgtgttgtgtgtattcaactcacagagttgaatgatcctttacacagaacagtcttgaaacactctttttgtggaatttgcaagtggagatttcagccgctttgaggtcaatggtggaataggaaatatcttcctatagaaattagacagaatgattctcagaaactcctttgtgatgtgtgtgttcaactcacagagtttaacctttcttttcatagagcagttaggaaacactctgtttgtaaagtctgcaagtggatattcagacctctttgaggccttcgttggaaacgggatttcttcatattatgctagacagaagaattcccagtaacttccttgtgttgtgtgtgttcaactcacagagttgaactttcatttacacagagcagatttgaaacactctttttgtggaatttgcaagtggagatttcaagcgctttgaggccaaaggcagaaaaggaaatatcttcgtataaaaactggacagaatcattctcagaaactgctgcgtgatgtgtgcgttcaactctcagagtttaacttttcttttcattcagcggtttggaaacactctgtttgtaaagtctgcacgtggaaattttgaccacttagaggccttcgttggaaacgggtttttttcatataaggctagacagaagaattcccagtaacttccttgtgttgtgtgcattcaactcacagagttgaacgttcccttagacagagcagatttgaaacactctatttgtccaatttgcaagtgtagatttcaagcgctttaaggtcaacggcagaaaaggaaatatcttcgtttcaaaactagacagaatgattctcagaaaatcttttgtgatgtgtgcgttcaactcacagagtttaacttttcttctcatagagcagttaggaaacactctgtttgtaaagtctgcaagtggatatgcatacctctttgaggccttcgttggaaacgggatttcttcatattctgctagacagaagaattctcagtaacttccttgtgttgtgtgtattcaactcacagagttgaaggatcctttacagagagcaggcttgaaacactctttttgtcgaatttgcaaatggagatttcagccgctttgaggtcaatggtagaagaggaaatatcttcttatagaaactagacagaatgattctcagaaacttctttgtgatgtgtgcgttcaactcacagagtttaacctttcttttcatagagcagttaggaaacactgtgtttttaaactgtgcaagtggatattgagacctctttgaggccttctttggaaacgggatttcttcatactgtgctagacagaagaattcccagtaacttccatgtgttgtgtgtgttcaactcacagagttgaactttcatttacacagagcagatttgaaacactctttttgtggaatttgcaaatggagatttcaagcgctttgaggccaaaggcagaaagggaaatatcttcgtctaaaaactagacagaatcattctcagaaactgctctgcgatgtgtgcgttcaactctcagagtttaacttatcttttcattcagcagtttggaaacactctgtttgtaaagtctgcacgtggataatttgaccacttagaggtcttcgttggaaacgggtttttatcatgtaaggctagacagaagaattctcagtaacttccttgtgttgtgtgtattcaactgacagagttgaactttcatttagacagagcagatttgaaaaactctttatgtggaatttgcaagtggagatttcaagcgctttgaggccaaagacagaaaaggaaatatcttcgtataaaaactagacagaatcattccctcaaactgcgttgtgatgtgttcgatcaactcacggagtttaacctttcttttcatagagcagttaggaaacactctgtttgtaaactctgcaagtggatattcagacctctttgaggacttcgttggaaacgggatttcttcatattatgctagacagaagaattctcagtaacttctttgtgttgtgtgtattcaactcacagagtttaccgatcctttacacagagctgacctgaaacactctttttgtcgaatttgcaagtggagatttcagccgctttgaggtcaatggtagaataggaaatatcttcctatggaaattcgacagaatgattctcagaaaatcttttgtgatgtgtgcgttcaactcacagagtttaacttttcttctcatagagcagttaggaaacactctgtttgtaaagtctgcaagtggatattcagacctctttgaagccttcgttggaaacgggatttcttcatattatgctagacagaagaattctcagtaacttccttgtgttgtgtgtattcaactgacagagttgaactttcatttagagagagcagatttgaaacactctttttgtggaatttgcaagtggagatttcaagcgctttgaggccaaaggcagaaaaggaaatatcttcgtataaaaactagacagaatcattctcagaaactgctgcgtgatgtgtgcgttcaactctcagagtttaacttttcttttcattcagcggtttggaaacactctgtttgtaaagtctgcacgtggaaattttgaccacttagaggccttcgttggaaacgggattttttcatgtaaggctagacagaagaattcccagtaacttccttgtgttgtgtgcattcaactcacagagttgaacgttcccttagacagagcagatttgaaacactctatttgtgcaatttgcaagtgtagttttcaagctctttaaggtcaacggcagaaaaggaaatatcttggtttcaaaactagacagaatcattcccacaaactgcgttgtgatgtgttcgttcaactcagagagtttaacctttctgttcatagagcagttaggaaacactctgtttgtaaagtctgtaagtggatattctgacatcttgtggccttcgttggaaacgggatttcttcatattctgctagacagaagaattctcagtaacttccttgtgttgtgtgtattcaactcacagagttgaacgatcctttacacagagcagacttgaaacactctttttgtggaatttgcaagtggagatttcagcctctttgtggtcaatggtagaaaaggaaatatcttcgtataaagactagacagaatgattcccagaaactcctttgtgatgtgtgcgttcaactcacagagtttaacctttcttttcatagagcagttaggaaacactctgtttgtaaagtctgcaaggggatattcagacctctttgaggccttcgttggaaacgggatttcttcgtattctgctagatagaagaattctcagtaacttccttgtgttgtgtgtattcaactgacagagttgaactttcatttagagagagcagatttgaaactctgtttttgtggaatttgcaagtggagatttcaagcgctttgaggccaaaggcagaaaaggaaatatcttcgtataaaaactagacagaatcattctcagaaactgctctgcgatgtgtgcgttcaactctcagagtttaacttttcttttcattcagcagtttggaaacactctgtttgtaaactctgcacgtggatattttgaccacatagaggccttcgttggaaacgggtttctttcctgtaaggctagacagaagtattcccagtaacttccttgtgttgtgtacattcaactcacagagttgaacgttcccttagacagagcagatttgaaacactctttttgtgcaattggcaagtggagatttcaagcgctttaaggtcaatggcagaaaaggaaatatcttcgtttcaaaactagacagaatcattcccacaaactgcgttgtgatgtgttcgttcaactcacagagtttaacctttcttttcatagagcagttaggaaacagtctgtttgtaaattctgtaagtggatattctgacatcttgtggccttcgttgtaaacgggatttcttcatattctgctagacagaagaattctcagaaacttccttgtgctgtgggttttcaactcacagagttgaacgatcctttacacagagcagacttgaaacactccttttgtggaatttgcaagtggagatttcagccgctttgaggtcaatggtagaataggaaatatcttcctatagaaagtagacagaatgattctcagaaactcctttgtgatgtgtgcgttcaactcacagagtttaacctttcttttcatagagcagttaggaaacactctgtttgtaaattctgcaagtggatattcagacctctttgagaccttccttggaaacgggtttttttcatataaggctagacagaagaattcccagtaacttccttgtgttgtgtgtgttcaactcacagagctgaactttcatttacacagagcagatttgaaacactctttttgtggaatttgcaagtggagatttcaagcgctttaaggccaaaggcagaaaaggaaatatcttcgtttcaaaactagacagaatcattctcggaaactgctctgtgatgtgtgcgttcaactctcagagtttaacttttcttttcattcagcagtttggaaacactctgtttgtaaagtctgcacgtggatattttgaccacttaaaggccttcgttggaaacgtgtttttttcctgtaaggctagacagaagaattcccagtaacttccttgtgttgtgtacattcaactcacagagttgaacgttcccttagacagagcagatttgaaacactctttttgtgcaattggcaagtggagatttcaagcgctttgaggtcaatggcagaaaaggaaatatcttcgtttcaaaactagacagaatcattcccacaaactgcgttgtgatgtgttcgttcaactcacagagtttaacctttcttttcatagagcaggtaggaaacactctgttggtaaattctgtaagtggatattctgacatcttgtggccttcgttggaaacgggatttctacatattctgccagacagaagaattctcagaaacttacttgtgttgtgtgttttcaactctcagagttgaacgatcctttacacagagcagacttgaaacactccttttgtggaatttgcaagtggagatttcagccgctttgaggtcaaaggtagaataggaaatatcttcctatagaaagtagacagaatgattctcagaaactcctttgtgatgtgtgcgttcaactcacagagtttaacctttcttttcacagagcagttaggaaacactctgcttgtaaagtctgcaagtggatattcagccctctttgaggccttcgttggaaacgggtttttttcatataaggctagacagaagaattctcagaatcttccttgtgttgtgtgtattcaactcacagagttgaacgatccttttcacagagcagacttgaaacactctttttgtggaatttgcaagtggagatttcagccgcgttgaggtcaatggtagaaaaggaaatatgttcgtataaaaactagacagaatgattctcataaactcctttgtgaagtgtgcgttcaaatcacagagtttaacttttcttttcatagagcagttaggaaacactctgtttgtaaagtctgcaagtggatattcagacctctttgaagccttcgttggaaacgggatttcttcatattatgctagacagaagaattctcagtaacttccttgtgttgtgtgtattcaactcacagagttgaacgatcctttacacagagcagccttgaaacattctttttgtggaatttgcaagtggagatttcagccgctttgaggtcaatggtagaataggaaatatcttcctatagaaactagacagaatgattctcagaaactcctttgtgatgtgtgcgttctactcacagagtttaacctttcttttcatagagcagttaggaaacactctgtttgtaaagtctgcaagtggatatacagacctccttgaggccttcgttggaaacgggatttcttcatattatgctagacagaagaattcccagtaacttccttgtgttgtgtgtgttcaactcacagagttgaactttcatttacacagagcacatttgaaacactctttttgtggaatttgcaagtggagatttcaagcgctttgaggccaaaggcagaaaaggaaatatcttcgtttcaaaactagacagaatcattctcagaaactgctctgcgatgtgtgcgttcaactctcagagtttaacttttgttttcattcagcagtttggaaacactctgtttgtaaagtctgcacgtggataatttgaccacttagaggccttcgttggaaacgggttttttccatgtaaggctagacacaagaattcccagtaacttcccttgtgttgtgtacattcaactcacagagttgaacgttcccttagacagagcagatttgaaacactctttttgtgcaattggcaaatggagatttcaagcgctttaaggtcaatggcagaaaaggaaatatcttcgtttcaaaactagacagaatcattcccacaaactgcgttgtgatgtgttcgttcaactcacagcagtttaacctttctattcatagagcagttaggaaacactctgtttgtaaagtctgtaagtggatattctgacatcttgtggccttcgttggaaacgggatttcttcctattctgctagacagaagaattctcagtaacttccttgtgttgtgtgcattcaactcacagagttgaacgatcctttacacagagcagacttgaaacactctttttgtggaatttgcaagtggagatttcagccgctttgaggtcaatggtagaaaacgaaatatcttcgtatagaaactagacagaatgattctcagaaactcctttgtgatgtgtgtgttcaactcacagagtttaacctttcttttcatagagcagttaggaaacactctgtttgtaaagtctgcaagtggatattcagacctccttgaggccttcgttggaaacgggatttcttcatattctgctagacagaagaattctcagtaacttccttgtgttgtgtttattcaactcacagagttgaacgatcctttacacagagcagacttgaaacactctttttgtggaatttgcaagtggagatttcagccgctttgaggtcaatagtagaaaaggaaatatcttcgtagaaaaactagacagaatcattctcagaaactgctgcgtgatgtgtgcgttcaactctcagagtttaacttttcttttcattcagcggtttggaaacactctgtttgtaaagtctgcacgtggatattttgaccacttagaggccttcgttggaaacgggttttttgcatgtaaggctagacagaagaattcccagtaacttccttgtgttttgtacattcaacccacagagttgaacgtttccttagacagagcagatttgaaacactctttttgtgcaattggcaagtggtgatttcagccgctttcaggtcaaaggtagaaaaggaaatatcttcctataaaaactagacagaatcattcccacaaactgcgttgtgatgtgttcgttcaactcacagagtttaacctttctgttcatacagcagttaggaaacactctgtttgtaaagtctgtaagtggatattctgacattttgtggccttcgttggaaatgggatttcttcatattctgctagacagaagaattctcagtaagttccttgtgttgtgtgtattcaactcacagagttgaacgatcctttacacagagcagacttgaaacactctttttgtggaatttgcaagtggagatttcagccgctttgaggtcaatggcagaataggaaatatcttcctatagaaactagacagaatgattctcagaaactcctttgtgatgtgtgcgttcatctcacagagtttaacttttcttttcatagagcagttaggaaacactctgtttgtaaagtctgcatgtggatattcagacctctttgaggccttcgttcgaaaagggatttcttcatattatgctagacagaagaattctcagtaacttccttgtgttgtgtgtattcaactgacagagttgaactttcatttagagagagcagatttgaaacactgtttttgtggaatttgcaaatggagatttcaagcgctttggtgccaaaggcagaaaaggaaatatcttcgtataaaaactagactgaatcattctcagaaactgctgcgtgatgtgtgcgttcaactctcagagtttaacttttcttttcattcagcggtttggaaacactctgtttgtaaagtctgcacgtggatattttgaccacttagaggccttcgttggaaacgggttttttttcatgtaaggctagacagaagaattcccagtaacttccttctgttgtgtgcattcaactcacagagttgaacgttcccttagacagagcagatttgaaacactctatttgtgcaatttgcaagtgtagatttcaagcgctttaaggtcaacggcagaaaaggaaatatcttcgtttcaaaactagacagaatcattcccacaaactgcgttgtgatgtgttcgttcaactcacagagtttaacctttctgttcatagagcagttaggaaacactctgtttgtaaagtctgtaagtggatattctgacatcttgtggccttcgttggaaacgggatttcttcctattctgctagacagaataattctcagtaacttccttgtgttgtgtgtattcaactcacagagttgaaggatcctttacagagagcaggcttgaaacacactttttgtcgaatttgcaagtggagatttcagccgctttgaggtcaatggtagaataggaaatatcttcttatagaaactagacagattgattctcagaaactcctttgtgatgtgtgcgttcaactcacagagtttaacctttcttttcatagagcagttaggaaacactctctttgtaaagtctgcaagtggatattcagacctccttgaggccttcgttggaaacgggatttcttcatattatgctaggcagaagaattctcagtaacttccttgtgttgtgcgtattcaactcacagagttgaacgatcctttacacagagcagacgtgaaacactctttttgtggaatttgcaagtggagatttcagccgctttgaggtcaatggtagaataggaaatatcttcctatagaaactagacagaatcattctcagaaaatgctctgtgatgtgtgcgttcaactctcagagtttaacttttcttttcattcagcagtttggaaacactctgtttgtaaagtctgcacgtggatattttgaccacttagaggccttcgttggaaacgggtttttttcatgtaagggtagacagaagaattctcagtaacttccttgtgttgtgtgtattcaactcacagagttgaacgatcctttaaacagagcagacttgaaacactctatttgtgcaatttgcaagtgtagatttcaagcgctttaaggtcaatggcagaaaaggaaatatcttcgttttaaaactagacagaatcattcccacaaactgcgttgtgatgtgttcgttcaactcacagagtttaacttttctgttcatagagcagttaggaaacactctgtttgtaaagtctgcaattggatattcagacctccttgaggcattcgttggaaacgggatttcttcatattctgctagacagaataattctcagtaacttccttgtgttgtgtgtattcaactcacagagttgaacgatcctttacacagagcagacttgaaacattctttttgtggaatttgcaactggagatttcagccgctttgaggtcaatggtagaataggagatatcttcctatagaaactagacagaatgattctcagaaactcctttgtgatgtgtgcgttcaactcacagagtttaacctttcttttcatagagcagttaggaaacactctgtttgtaaactctgcaagtggatattcagacctccctgaggccttcgtcggaaatgggatttcttcatattctgctagacagaagaattcccagtaacttccttgtgttgtgtgtattcaactcacagagttgaactttcatttacacagagcaaatttgaaacactctttttgtggaatttgcaagtggagatttcaagcgctttgaggccaaaggcagaaaaggaaatatcttcgtataaaaactagacagaatcattctcagaaactgctctgcgatgtgtgcgttcaactctcagagtttaacttttcttttcattcagcagtttggaaacactctgtttgtaaagtctgcacgtggatattttgatcacttagaggccttcgttggaaacgggtttctttcttgtaaggctagacagaagaattcccagtaacttccttgtgttgtgtacattcaactcacaggagttgaacgttcccttagacagagcagatttgaaacactctttttgtgcaattggcaagtggagatttcaagcgctttatggtcaatggcagaaaaggaaatatcttcgtttcaaaactagacagaatcattcccacaaactgcgttgtgatgtgttcgttcaactcacagagtttaacctttcttttcatagagcagttaggaaagagtctgtttgtcaattctgtaagtggatattctgacatctagtggccttcgttggaaacgggatttcttcatattctgctagacagaagaattctcagtaacttccttgtgttgtgtgtattcaactcacagagttgaacgatcttttacagagagcagacttgaaacactctttttgtggaatttgcaagtggagatttcagccgctttgaagtcaaaggtagaataggaaatatcttcctatagaaactagacagaatgattctcagaaactcctttgtgatgtgtgcgttcaactcacagagtttaacctttcttttcatagagcagttaggaaacactctgtttgtaaagtctgcaagtggatattcagacctcattgaggccttcgttggaaacgggatttctacatattatgctagacagaagaattctcagtaacttccctgtgttgtgtgtattcaactgacagagttgaactttcatttagagagagcagatttgaaacactgtttttgtggaatttgcaagtggagatttcaagcgctttggggccaaaggcagaaaaggaaatatcttcgtataaaaactagacagaatcattctcagaaactgctctgcgatgtgtgcgttcaactctcagagtttaacttttcttttcattcagaagtttggaaacactctgtttgtaaagtctgcacgtggataacttgaccacttagaggccttcgttggaaacgggtttttttcatgtaaggctagacagaagaattcccagtaacttccttgtgttgtgtgcactcaactcacagagttgaacgttcccttagacagagcagatttgaaacactctatttgtgcaatttgcaagtggagatttcaagcgctttatggtcaatggaagaaaaggaaatatcttcgtttcaaaactagacagataatcattcccacaaactgcgttgtgatgtgttcgttcaactcacagtagtttaacctttcttttcatagagcagttaggaaacagtctgtttgaaaattctgtaagtggatattctgacatcttgtggccttcgttggaaacgggatttcttcatattctgctagacagaagaattctctgtaactgccttgtgttgtgtgtattcaactcacagagttgaacgatcctttacacagagcagacttgaaacactctttttttggaatttgcaagtggagatttcagccgctttgaggtcaatggtagaataggaaatatcttcctatagaaagtagacagaatgattctcagaaactcctttgtgatgtgtgtgttcaactcacagagtttaacctttcttttcatagagcagttaggaaacactctgtttgtaaagtatgcaagtggatattcagacctctttgaggccttcgttggaaacgggatttttcatataaggctagacagaagaattcccagtaacttccttgtgttgtgtgtgttcaactcacagagttgaactttcatttacacagagcagatttgagacactctttttgtggaatttgctaatggagatttcaagcgctttgaggccaaaggcagaaaaggaaatatcttcgtataaaaactagacagaatcattctcagaaactgctctgcgatgtgtgcgttcaactctcagagtttaacttttcttttccttcagcagtttggaaacactctgtttgtaaagtctgcacgtggatattttgaccacttagaggccttcgttggaaacgggtttttttcctgtaaggctagacagaagaattcccagtaacttccttgtgttgtgtgcattccactcacagagttgaacgttcccttagacagagcagatttgaaacactctatttgtgcaatttgcaagtgtagatttcaagcgctttaaggtcaatggcagaaaaggaaatatcttcgtttcaaaactagacagaattattcccacaaactgcgttgtgatgtgttcgttcaactcacagagtttaacctttcttttcatagagcagttaggaaacagtctgtttgtaaattctgtaagtggatattctgacatcttgtggccttcgttggaaacgggatttcttcatattctgctagacagaagaattctcagtaacttccttgtgttgtgtgtattcaactcacagagttgaacgatcctttacacagagcagacttgaaacactctttttctggaatttgcaagtggagatttcagccgctttgaggtcaatggtagaaaaggaaactatcttcttataaagactagacagaatgattctcagaaactcctttgtgatgtgtgcgttcaactaacagagtttaacctttcttttcatagagcagttaggaaacactctgtttgtaaagtctgcaagtggatattcagacctctttgaggccttcgttggaaacgggatttcttcatattctgctagacagaagaattctcagtaacttccttgtgttgtgtgtattcaactgacagagttgaactttcatttatggagagcagatttgaaacactggttttgtggaatttgccagtggagatttcaagcgctttggggccaaaggcagaaaaggaaatatcttcgtataaaaactagacagaatcattctcagaaactgctctgcgatgtgtgcgttcaactctcagagtttaacttttcttatcattcagcagtttggaaacactctgtttgtaaagtctgcacgtggataatttgaccacttagaggccttccttggaaacgggtttttttcatgtaaggctagacagaagaattcccagtaacttccttgtgttgtgtgcattcaactcacagagttgaacgttcccttagacagagcagatttgaaacactgtatttgtgcaatttgcaagtgtagatttcaagcgctttaaggtcaatggcagaaaaggaaatatcttcgtttcaaaactacacagaatcattcccacaaactgcgttgtgatgtgttcgttcaactcacagagtttaacctttcttttcatacagcagttaggaaacagtctgtttgtaaattctgtaagtggatattctgacatcttgtggccttcgttggaaacgggatttcttcatattctgctagacagaagaattctcagtaacttccttgtgttgtgtgtattcaactcacagagttgaacgatcctttacacagagcagacttgaaacactcgttttgtggaatttgcaagtggagatttcagccgcgttgaggtcaatggtagaaaaggaaatatcttcgtataaaaactagacagaatgattctcagaaactcctttctgatgtgtgcgttcaactcgcagagtttaacttttcttttcattgagcagttaggaaacactctgtttgtaaagtcagcaagtggatattcagacctctttgaggccttcgttggaaacgggatttctgcatattatgctagacagaaggattcccagtaacttccttgtgttgtgtgtgttcaactcacagagttgaactttcatttacacagaggagatttgaaacactctttttgtggaatttgcaggtggagatttcaagcgctttgaggccaaaggcagaaaaggaaatatcttcgtataaaaactagacagaatgattctcagaaactcctttgtgatgtgggcgttcaactcacagagtttaacgtttcttttcatagagccgttaggaaacactctgtttgtaaagtctgcacgtggatatttggacttctttgaggccttcgttggaaacgggtttttttcatgtaaggctagacggaagaattcccagtaacttccttgtgttgtgtgcattcaactcacagagctgaacgttcccttagacagagcagatttgaaacactctatttgtgcaatttgcaagtgtagatttcaagcgctttaaggtcaacggcagaaaaggaaatatcttcgtttcaaaactagacagaatcattcccacaaactgcgttgtgatgtgttctttcaactcacagagtttaacctttctgttcatagagcagttaggaaacactctgtttgtaaagtctgtaagtggatattctgacatcttgtggccttcgttggaaacgggatttcttcatattactgctagacagaataattctcagtaatttccttgtgttgtgtgtattcaactcacagagttgaaggatcctttacagagagcaggcttgaaacactctttttgtcgaatttgcaagtggagatttcagccgctttgaggtcaatggtagaataggaaatatcttcttatagaaactagacaaaatgattctcataaactcctttgtgatgtgtgcgttcaactcacagagtttaacctttcttttcatagagcagttaggaaacactctgtttgtaaagtctgcaagtggatattcagacctacttgaggccttcgttggaaacgggatttcttcatattctgctagacagaagaattcccagtaacttcccttgtgttgtgtgtgttcaactcacagagttgaactttcatttacacagagcagatttgaaacactctttttgtggaatttgaaagtggagatttcaagcgctttgaggccaaaggcagaaaaggaaatatcttcgtataaaaactagacagaatcattctcagaaactgctctgcgatgtgtgcgttcagctctcagagtttaacttttcttttcattcagcagtttggaaacactctgtttgtaaagtctgcacgtggatattttgaccacttggaggccttcattggaaacgggtttttttcatgtaaggctagacagaagaattcccagtaacttccttgtgttgtgtacattccactcacagagttgaacgttcccttagacagagcagatttgaaacactctttttgtgcaattggcaagtggagatttcaagcgctttaaggtcaatggcagaaaaggaaatatcttcgtttcaaaactagacagaatcattcccacaaactgcgttgtgatgtgttcgttcaactcacagagtttaacctttcttttcatagagcagttaggaaacagtctgtttgtaaattctgtaagtggatattctgacatcttgtggccttcgttggaaacgagatttcttcatattctgctagacagaagaattctcagaaacttccttgtgttgtgtgttttcaactcacagaggtgaacgatcctttacacagagcagacatgaaacagtctttttgtggaatttggaagtggagaattcagccgctttcaggtcaatggtagaataggaaatatcttcctatagaaaattgacagaatgattctcagaaactcctttgtgatgtgtgcgttcaactcacagagttcaacctttcttttcatagagcagttgggaaacactctgtttgtaaagtctgcatgtggatattcagacatccttgaggctttcgttggaaacgggatttcttcatattctgctagaaagaagaattctcagtaacttccttgtgttgtgtgtattcaactgacagagttgaactttcatttagagagagcagatttgaaacactgtttttgtggaatttgcaagtggagattttaagcgctttggggccaaaggcagaaaaggaaatatcttcgtataaaaactagacagaatcattctcagaaactgctctgcgatgtgtgcgttcaactctcagagtttaacttttcttttcattcagcagtttggaaacactctgtatgtaaagtctgcacgtggatattttgaccacttagaggccttcgttggaaacgggtttttttcctgtaaggctagacagaagaattcccagtaacttccttgtgttgtgtacattcaactcacagagttgaacgttcccttagacagagcagatttgaaacactctttttgtgcaattggcaaatggagatttcaagcgctttaagttcaaaggcagaaaaggaaatatcttcgtttcaaaactagacagaatgattctcagaaactcctttgtgatgtgtgcgttcaactcaaagagtttaacctttcttttcatagagcagttaggaaacactctgtttgtaaagtctgcaagtggatattcagacctctttgaggccttcgttggaaacgggatttcttcatattatgctagacagaagaattctcagtaacttccttgtgttgtgtgtattcaactcacagagttgaacgatcctttacacagagcagactttaaacactctttttgtggaatttgcaagtggagatttcagccgctttggggtcaatagtagaaaaggaaatatcttcgtagaaaaactagacagaatgattctcagaaaatcctttgtgatgtgtgcgttcaactcacagagtttaacttttcttttcatagagcagttaggaaacactctgtttgtaaagtcttcaagtggatattcagacctctttgaggccttcgttggaaacgggatttcttcatattatgctagacagaagaattctcagtaacttccttgcgttgtgtgtattcaactgatagagttgaactttcatttagacagagcagatttgaaacacgctttttgtggaatttgcaagtcgagatttcaagcgctttgaggccaaaggcagaaaaggaaatatcttcgtataaaaactagaccgaatcattctcagaaactgctctgcgatgtgtgcgttcaactctcagagtttaactttgcttttcattcagcagtttggaaacactctgtttgtaaagtctgcacgtggatattttgaccacttagaggccttcgttggaaacgggtttttttcctgtaaggctagacagaagaattcccagtaacttccttgtgttgtgtacattcaactcacagagttgaacgatcccttagacagagcagatttgaaacactctttttgtgcaattggcaaatggagatttcaagcactttaaggtcaatcgcagaaaaggaaatatcttcgtttcaaaactagacagaatgattctcagaaactcctttgtgatgtgtgcgttcaactcacagagtttaacttttcttttcatagagcagttaggaaacactctgtttgtaaagtctgcaagtggatattcagacgtctttgaggccttcgttggaaacgggatttcttcatattctgctagacagaagaattctcagtaacttccttgtgttttgtgtattcaactcacagagttgaacgatcctttacacagagcagacttgaaacacactttttgtggaatttgcaagtggagatttcagccgctttgaggtcaatggtagaataggaaatatcttcctatagaaactagacagaatgattctgagaaactcctttgtgatgtgtgcattcaactcacagagtttaacctttcttttcatagagcagttaggaaacactgtgcttgtatagtctgcaagtggatactcagacctccttgaggccttcgttggaaacgggatttcttcctattatgctagacagaagaattctcagtaactcccttgtgttgtgtgtattcaactgacagagttgaactttcatttagagggagcagatttgaaacactgtttttgtggaatttgcaagtggagatttcaaacgctttggggccaaaggcagaaaaggaaatatcttcgtataaaaactagacagaatcattctcagaaactgctctgcgatgtgtgcgttcaactctcagagtttaacttttcttttcattcagcagtttggaaacactctgtttgtaaagtctgcacgtgcataatttgaccacttagaggccttcgttggaaacggttttttttcatgtaaggctagacagaagaattcccagtaacttccttgtgttgtgtgcattcaactcacagagttgaacgttcccttagacagagcagatttgaaacactctatttgtgcaatttgcaagtgtagatttcaagcgcttaaagtcaacggcagaaaaggaaatatcttcgtttcaaaactagacagaatcattcccacaaactgcgttgtgatgtgttcgttcaactcacagagtttaacctttcttttcatagagcagttaggaaacactctgtttgtaaagtctgcaagtggatattcagacctctttgaggccttcgttggaaacgggatttcttcatatactgctggacagaggaattctcagtaacttccttgtgttgtgtgtattcaactcacagagttgaacgatcctttacacagagcagacttgaaacactctttttgtggaatttgcaagtggagatttcagccgctttgatgtcaatggtagaaaaggaaatatcttcgtataaagccgagacagaatgattctcagaaactcctttgtgatgtgtgcgttcaactcacagagtttaacctttcttttcatagagcagttagtaaacactctgtttataaagtctgcaagtggatattcagacccctttgaggccttcgttggaaacgggatttcttcatattctgctagacagaagaattcccagtaacttccttgtgttgtgtgtgttcgactcacagagttgaactttcatttacacagagcagatttgaaacactctttttgtggaatttgcaagtggagatttcaagcactttgaggccaaaggcagaaaaggaaatatacttcgtttcaaaactagacagaatcattctcagaaactgctctgcgatgtgtgcgttcaactctcagagtttaacttttcttttcattcagcagtttggaaacactctgtttgtaaagtcttcacgtggataatttgaccacttagaggccttcgttggaaacgggttttttcatgtaaggctagacagaagatttcccagtaacttccttgtgttgtgtacattcaactcacagagttgaacgttcccttagacagagcagatttgaaacactctttttgtgcaattggcaaatggagatttcaagcgctttaatgtcaatggcagaaaaggaaatatcttcgtttcaaaactagacagaatgattctcagaaactcctttgtgatgtgtgcgttcaactcacacagtttaacctttctgttcatagagcagttaggaaacactctgtttgtaaagtctgtaagtggatattctgacatcttgtggccttcgttggaaacgggatttcttcatattctgctagacagaagagttctcagtaacttccttgtgttgtgtgtattcaactcacacggttgaacgatcctttacacagagcagacttgtaacactctttttgtggaatttgcaagtggagatttcagccgctttgaagtcaaagtagaaaaggaaatatcttcctataaaaactagacagaatgattctcagaaactcctttgtgatgtgtgcgttcaactcacagagtttaacctttcttgtcatagagcagttaggaaacactctgtttgtaaagtctgcaagtggatattcagacatctttgaggctttcgttggaaacgggatttcttcatattctgctagacagaagaattctcagtaacttccttgttttgtgtgtattcaactgacagagttgaactttcatttagagagagcagatttgaaacacggtttttgcggaatttgcaagtggagatttcaagcgctttggggccaaaggcagaaaaggaaatatcttcgtataaaaactagacagaatcattctcagaaactgctgcgtggtgtgtgcgttcaactctcagagtttaacttttcttttcattcagcggtttggaaacactctgtttgtaaagtctgcacgtggatattttgaccacttagaggccttcgttggaaacgggttttcttcatgtaaggctagacagaagaattcccagtaacttccttgtgttgtgtgcattcaactcacagagttgaacgttcccttagacagagcagatttgaaacactctttttgtgcaattggcaagtggagatttcaagcgctttaaggtcaatggaagaaaaggaaatatcttcgtttcaaaactagacagaagaattctcagtaacttccttgtgttgtgtgtattcaactcacagagttgaacgatcctttacacagaacagacttgtaacactctttttgtggaatttgcaagtggagatttcagccattttgaagtcaaaggtagaaaaggaaataacttcctataaaaactagacagaatgattctcagaaactcctttgtgatgtgtgcgttcaactcacagagtttaacctttgttttcatagagcagttaggaaacactctgcttgtaaagtctgcaagtggatattcagccctctttgaggccttcgttggaaacgggtttttttcatataaggctagacagaagaattctcagtaacttccttgtgttgtgtgtattcaagtgacagagttgaactttcatttagagagagcagatttgaaacactgtttttgtggaatttgcaattggagatttcaagcgctttggggccgaaggcagaaaaggaaatatcttcgtataaaaactagacagaatcattctcagaaactgctctgcgatgggtgcgttcaactctcagagtttaactttgcttttcattcagcagtttggaaacactctgtttgtaaagtctgcacgtggataatttgaccacttagaggccttcgttggaaacgggtttttttcatgtaaggctagacagaagaattcccagtaacttccttgtgttctgtacattcaactcacagagttgaacgttcccttagacagagcagatttgaaacactctttttgtgcaattggcaagtggagatttcaagcgctttaaggtcaatggcagaaaaggaaatatcttcgtttcaaaactagacagaatgattctcagaaactcctttgtgatgtgtgcgttcaactcacagagtttaacctttctgttcatagagcagttaggaaacactctgtttgtaaagtctgcaagtggatattcagacctccttgaggccttcgttggaaacgggatttctttatattctgctagacagaagaattctcagtaacttccttgtgttgtgtgtattcaacacacagagttgaacgatcctttacacagagcagacttgaaacactctttttgtggaatttgcaagtggagatttcagcctctttgaggtcaatggtagaataggaaatatcttcctatagaaactagacagaatgattctgagaaactcctttgtgatgtgtgcgttcaactcacagagtttaacctttcttttcatagagcagtttggaaacactccgtttgtaaactctgcaagtggatattcagacctccttgagaccttccttggaaacgggatttcttcatattatgctagacagaagaattctcagtaacttcctagtgttgtgtgtattcaactgacagagttgaactttcatttagagagagcagatttgaaacactgtttttgtggaatttgcaagtggagatttcaagcggtttggggccaaaggcagaaaaggaaatatcttcgtataaaaactagacagaatcattctcagaaactgctgcgtgatgtgtgcgttcaactctcagagtttaacttttcttttcattcagcagtttggaaacactctgtttgtaaagtctgcacgtggaaattttgaccacttagaggccttcgttggaaacgggtttttttcatgtaaggctagacagaagaattcccagtaacttcccttgtgttgtgtgcattcaactcacagagttgaacgttcccttagacagagcagatttgaaacactctatttgtgcaatttgcaagtgtagttttcaagctcttttaggtcaacggcagaaaaggaaatatcttggtttcaaaactagacagaatcattcccacaaactgcgttgtgatgtgttcgttcaactcacagagtttaacctttctgttcatagagcagttaggaaacactctatttgtaaagtctgcaagtggatattcagacctccttgaggccttcgttggaaacgggatttcttcatattctgctagacagaagaattctcagaatcttccttgtgttgtgtgtattcaactcaccgagttgaacgatcctttacacagagcagacttgaaacactctttttgtggaatttgcaagtggagatttcagccgctttgaggtccatgttagaaaaggaaatatcttcgtacaaaaattgacagaatgattctcagaaacttctttgtgatgtgtgccttcaactcacagagtttaacctttcttttcatagagcagttaggaaacactctgtttgtaaagtctgcaagtggatattcagacctctttgaggccttcgttggaaacgggtttttttcatataaggctagacagaagaattcccagtaacttccttgtgttgtgtgtgttcaactcacagagttgaactttcatttacacagagcagattggaaacactctttttgtggaatttgcaagtggagatttcaagcgctttgaggacaaaggcagaaaaggaaatatcttcgtataaaaattagacagaatcattctcagaaactgctctgcgatgtgtgcgttcaactctcagagtttaacttttcttttcattcagcagtttggaaacactctgtttgtaaagtctgcacgtggatattttgaccacttagaggcctccgttggaaacgggtttctttcctgtaaggctagacagaagaattcccagtaacttccttgtgttgtgtgcattcaactcacagagttgaacgttcccttagacagagccgatttgaaacactctatttgtgcaattggcaagtgtagatttcaagcgctttaaggtcaacggcagaaaaggaaatatcttcgtttcaaaactagacagaatgattctcagaaactcctttgtgatttgtgcgttcaactcacagagtttaacttttcttttcatagagcagttaggaaacactctgtttgtaaagtgtgcaagtggatattcagacctctttgaggccttcgttggaaacgggatttcttcatattatgctagacagaataattctcagtaacttccttgtgttgtgtgtattcaactcacagagttcaacgatcctttacagagagcagacttgaaacactctttttgtggaatttgcaagtggagatttcagccgctttgaggtcaatggtagaataggaaatatcttcctatagaaactagacagaatgattctcagaaactcctttgtgatgtgtgcgttcaactcacagagtttaaccattcttttcatagagcagttaggaaacactctgtttgtaaagtctgcaaatggatattcagacctccttgaggccttcgttggaaacgggatttcttcatattctgctagacagaagaattctcagtaacttccttgtgttgtgtgtattcaactcacagacttgaatgatcctttacacagaacagtcttgaaacactctttttgtggaatttgcaagtggagatttcagccgatttgaggtcaatggtagaatagaaaatatcttcctatagaaactagacagaataattctcagaaactcctttgtgatgtgtgcgttcaactcacagagtttaacctttcttttcatagagcagttaggaaacactctgtttgtaaagtctgcaagtggatattcagacctctttgaggccttcgttggaaacgggtttttttcatataaggctggacagaagaattctcagtaacttccctgtgttgtgtgttttcaactgacagagttgaactttcatttagagagagcagatttgaaaaactgtttttgtggaatttgcaagtggagatttcaagcgttttggagccaaaggcagaaaaggaaatatcttcgtataaaaactagacagaatcattctcagaaactgctgcgtgatgtgtgcgttcaactctcagagtttaacttttcttttcattcagcggtttggaaacactctgtttgtaaagtctgcacgtggatattttgaccacttagaggccttcgttggaaacgggttttttcatgtaaggctagacagaagaattcccagtaacttccttgtgttgtgtacattccactcacagagttgaacgttcccttagacagagcagatttgaaacactctttttgtgcaattggcaaatggagatttcaagggctttaaggtcaatggcagaaaaggaaatatcttcgtttcaaaactagacagaatcattcccacaaactgcgttgtgatggttcgttcaactcacagagtttaaactttcttttcatagagcagttaggaaacagtctgtttgtcaattctgtaagtggatattctgacatcttgtggccttcgttggaaacgggatttcttcatattctcctagacagaagaattctcagaatcttccttgtgttgtgtgtattcaactcacagagttgaacgatcctttacacagagcagacttgaaacactctttttgtggaatttgcaagtggagatttcagccgctttgaggtccatggtagaaaaggaaatatctttgtataaaaactagacagaatgattctcaggaactcctttgtgatgtgtgtgttcaactcacagagtttaacctttcttttcatagagcagttagtaaacactctgtttataaagtctgtaagtgggtattcagacccctttggggccttcgttggaaacgggatttcttcatattatgctagacagaagaattctcagaaacttccttgtgttgtgtgtattcaactcacagagttgaacgatcgtttacacagagcagacttgaaacactctttttgtggaatttgcaagtggagatttcagccgctttgaggtcaatggtagaaaaggaaatatcttcgtataaaaactagacagaatgattctcagaaactcctttgtgatgtgtgcgttcaactcacagagttcaacctttcttttcacagagcagttgggaaacactctgtttgtaaagtctgcaagtggatattcagacttctttgaggccttcgttggaagcgggatttcttcatgttctgctagacagaagaattctcagtaacttccttgtgttgtgtgtattcaactgacagagttgaactttcatttagagagagcagatttgaaacacagtttttgtggaatttgcaagtggagatttcaagcgctatggggccaaaggcagaaaaggaaatatcttcgtataaaaactagacagaatcattctcagaaactgctgcgtgatgtgtgcgttcaactctcagagtttaacttttcttttcattcagcggtttggaaacactctgtttgtaaagtctgcacgtggatattttgaccacttagaggccttcgttggaaacgggtttctttcatgtaaggctagacagaagaattcccagtaacttccttgtgttgtgtgcattcaactcacagagttgaacgttcccttagacagagcagatttgaaacactctatttgtgcaatttgcaagtgtagatttcaagcgctttaaggtcaacggcagaaaagaaaatatcttcgtttcaaaactagacagaatcattcccacaaactgcgttgtgatgtgttcgttcaactcacagagtttaacctttcttttcatagagcagttaggaaacagtctgtttgtcaattctgtaagtggatattctgacatgcttgtggccttcgttggaaacgggatttcttcatattctgctagacagaagaattctcagtaacttccttgtgttgtgtgtattcaactcacagagttgaacgatcctttacacagagcagacttgaaacactctttctgtggaatttgcaagtggagatttcagccgctttgaggtcaatggtagaaaaggaaatatcttcgtataaagactagacagaatgattctcagaaacttctttgtgatgtgtgcgttcaactcacagagtttagcctttcttttcatagagcagttaggaaacactctgtttgtaaactctgcaagtggatattcagacctctttgaggccttcgttggaaactgggatttcttcatactatgctagacagaagaattcccagtaacttccatgtgttgtttgtgttcaactcacagagttgaactttcatttacacagagcagatttgaaacactctttttgtggaatttgcaaatggagatttcaagcgctttgaggccagaggcagaaaaggaaatatcttcgtataaaaactagacagaaatcattctcagaaactgctgcgtgatgtgtgcgttcaactctcagagtttaacttttcttttcattcagcggtttggaaacactctgtttgtaaagtctgcacgtggatattttgaccacttagaggccttcgttggaaacgggtttttttcatgtaaggctcgacagaagaattcccagtaacttctttgtgttgtgtgcattcaactcacagagttgaacgttcctttagaaagagcagatttgaaacactctttttgtgcaatttgcaagtggagatttcaagcgctttagggtcaatggcagaaaaggaaatatcttcgtttcaaaactagacagaatcattcacacaaactgcgttgtgatgtgtgcgttaaactcacagagtttaacctttcttttcatagagccgtctgtaagcgctctgtttgtcaagtctgcaagtggatattctgacctttttgtggacttcgttggaaacgggatttcttcctataatactagacagaagaattctcagtaacttccttgtgttgtgtgtattcaactcacggagttgaacgatcctttacacagagcagacttgaaacactctttttgtggaatttgcaagtggagatttcagccgctttggggtcaatggtagaaaaggaaatatcttcgtataaagactagacagaatgattctcagaaactcctttgtgatgtgtgcgttcaactcacagagttcaacctttcttttcatagagcagttaggaaacactctgtttgtaaagtctgcaagtggatattcagacatccttgaggctttcgttggaaacgggatttcttcatattctgctagaaagaagaattctcagtaacttccttgtgttgtgtgtattcaactgacagagttgaactttcatttagagagagcagatttgaaacactgtttttgtggaatttgcaagtggagatttcaagcgctttggggccaaaggcagaaaaggaaatatgcttcgtataaaaactagacagaatcattctctgaaactgctctgtgatgtgtgcgttcaactctcagagtttaacttttcttttcattcagcagtttggaaacactctgtttgtaaagtctgcacgtggatattttgactacttagaggccttcgttggaaacgggtttttttcatgtaaggctagacagaagaattcccagtaacttccttgtgttgtgtgcattcaactcacagagatgaacgttcccttagacagagcagatttgaaacactctatttgtgcaatttgcaagtgtagatttcaagcgctttaaggtcaatggcagaaaaggaaatatcttcgtttcaaaactagacagaatcattcccacaaactgcgttgtgatgtgttcgttcaactcacagagtttaacctttcttttcatagagcagttaggaaacactctgttggtaaattctgtaagtggatattctgacatcttgtggccttcgttggaaacgggatttcttcatattctgctagacagaagaattctcagaatcttccttgtgttgtgtgtattcaactcacagagttgaacgatcctttacacagagcagacttgaaacactctttttgtggaatttgcaagttgagatttcagccgctttgaggtccatggtagaaaaggaaatatcttcgtataaaactagacagaatgattctcagaaactcctttgtgatgtgtgtgttcaactcacaaagtttaacctttcttttcatagagcagttagtaaacactctgtttataaagtctgcaagtggatattcagacccctttgagaccttcgttggaaacgggatttcttcatattatgctagacagaagaattctcagtaacttccttgtgttgtgtgttttcaactgacagagttgaacattcatttagagagagcagatttgtaacactgtttttgtggaatttgcaagtggagatttcaagtgctttggggccaaaggcagaaaaggaaatatcttcgtataaaaactagacagaatcattctcagaaactgctgcatgatgtgtgcgttcaactctcagagtttaacttttcttttcattcagcggtttggaaacactctgtttgtaaagtctgcacgtggatattttgaccacttagaggccttccttggaaacgggttttttttcatgtaaggctagacagaagaattctcagtaacttcattgtgttgtgtgtattcaactcacagatttcaacgatcctttacacagagcagacttgaaacactctttttctggtatttgcaagtggagatttcagccgctttgaggtcaatggtagaataggaaatatcttcctatagaaactagacagaatgattctcagaaactcctttgtgatgtgtgcgttcaactcacagagttcaacctttcttttcatagagcagttgggaaacactctgtttgtaaagtctgcaagtggatattcagacttctttgaggccttcgttggaagcgggttttcttcatattctgcttgacagaagaattctcagtaacttccttgtgttgtgtgtattcaactcacagagttgaacgatcctttacacagagcagacttgaaacactctttttgtggaatttgaaagtggagatttcagccgctttgaggtcaatggtagaataggaaatatcttcctatagaaactagacagaatgattctcagaaacttctttgtgatgtgtgcgttcaactcacggagtttaacctttcttttcatagagcagttaggaaacactctgtttgtaaactctgcaagtggatattcagacctctttgaggccttcgttggaaacgggatttcttcatactatgctagacagaagaattcccagtaacttccttgtgttgtgtgtgttcaactcacagagttgaactttcatttacacagagcagatttgaaacactctttttgtggaatttgcaaatggagatttcaagcgctttgaggccaaagacagaaaaggaaatatcttcgtataaaaactagacagaatcattctcagaaactgctctgcgatgtgtgcgttcaactctcagagtttaacttttcttttcattcagcagtgtggaaacactctgtttgtaaactctgcacgtggatattttgaccacttagaggccttcgttggaaacgggtttttttcctgtaaggctagacagaagaattcccagtaacttccttgtgttgtgtgcattcaactcacagagttgaacgttccttagacagagcagatttgaaacactctatttgtgcaatttgcaagtgtagatttcaagcgctttaaggtcaatggcagaaaaggaaatatcttcgtttcaaaactagacagaatcattcccacaaactgcgttgtgatgtgttcgttcaactcacagagtttaccctttcttttcttagagcagttaggaaacagtctgtttgtaaattctgtaagtggttattctgacatcttgtggccttcgttggaaacgggatttcttcatattctgctagacagaagaattctcagtaacttccttgtgttgtgtgtattcaactcacagagttcaccgatcctttacacagagcagacttgtaacactctttttgtggaatttgcaagtggagatttcagccgctttgaagtcaaaggtagaaaagggaatatcttcctataaaaactagacagaatgattctcagaaactcctttgtgatgtgtgcgttcaacacacagagtttaacttttcttttcatagagcggttaggaaacactctgtttgtaaagtctgcaagtggatattcagacctctttgaggccttcgttggaaacgggatttcttcatattctgctagacagaagaattcccagtaacttccttgtgttgtgtgtgttcaactcacagagttgaactttcatttacacagagcagatttgaaacactctttttgtggaatatgcaagtggagatttcaagcgctttgaggccaaaggcagaaaaggaaatatcttcgtataaaaactagacagaatcattctcagagactgctctgtgatgtgtgcgttcaactctcagagtttaacttttcttttcattcagcagtttggaaacactctgtttgtaaagtctgcacgtggataatttgaccacttagaggccttcgttggaaacgggtttttttcatgtaaggctagacagaagaattcccagtaacttccttgtgttgtgtacattcaactcacagagttgaacgttcccttagacagagcagatttgaaacactctttttgtgcaattggcaaatggagatttcaagcgctttaagttcaatggcagaaaaggaaatatcttcgtttcaaaactagacagaatgattctcagaaactcctttgtgatgtgtgcgttcatctcacagagtttaacctttcttttcgtagagcagttaggaaacagtctgtttgtaaattctgtaagtggatattctgacatcttgtggccttcgttggaaacgggatttcttcatattctgctagacagaagaattctcagtaacttccttgtgttgtgtgtattcaactcacagagttgaacgaacctttacacagagcagacttgtaacactctttttgtggaatttgcaattggaattttcagccgctttgaagtcaaaggtagaaaaggaaatatcttcctataaaaactagacagaaatgattctcagaaactcctttgtgatgtgtgcgttcaactcacagagtttaacctttcttttcatagagcagttaggaaacactctgtttgtaaagtctgcaagtggatattcagacctctttgaggccttcgttggaaacgggtttttttcatataaggctagacagaagaattctcagtaacttccttgtgttgtgtgtattcaactgacagagttgaactttcatttagagagagcagatttgaaacactgtttttgtggaatttgcaagtggagatttcaagcgcttttgggccaaaggcagaaaaggaaatatcttcgtataaaaactagacagaatcattctcagaaactgctctgcgatgtgtgcgttcaactctcagagtttaacttttcttttcattcagcagtttggaaacactctgtttgtaaagtctgcacgtggataacttgaccacttagaggccttcgttggaaacgggtttttttcttgtaaggctagacagaagaattcccaggaacttccttgtgttgtgtacattcaactcacagagttgaacgttcccttagacagagcagatttgaaacactctttttgtgcaattggcaagtggtgatttcagccgctttgaggtcaatggtagaaaaggaaatatcttcgtataaaaactagacagaatcattcccacaaactgcgttgtgatgtgttcagttcaactcacagagtttaacctttctgttcatagagcagttaggaaacactctgtttgtaaagtctgtaagtggatattctgacatcttgtggccttcgttggaaacgggatttcttcatattctgctagacagaagaattctcagtaacttccttgtgttgtgtgtattgaactcgcagagttgaacgatcctttacacagagcagacttgaaacactctttttgtggaatttgcaagtggagatttcagccactttgaggtcaatagtagaaaaggaaatatcttcgtagaaaaactagacagaatgattctcagaaaatcttttgtgatgtgtgcgttcaactcacagagtttaacttttcttctcatagagcagttaggaaacactctgtttgtaaagtctgcaagtggatagtggatattcagacctctttgaggtcttcgttggaaacgggatttcttcatattatgctagacagaagaattcccagtaacttccttgtgttgtgggtgttcgactcacagagttgaactttcatttacacagagcagatttgaaacactctttctgtggaatttgcaagtggagatttcaagcgctttgaggccaaaggcagaaaaggaaatatcttcgtttcaaaactagacagaatcattctcagaaactgctctgcgatgtgtgcgttcaactctcagactttaacttttcttttcattcagcaatttggaaacactctgtttgtaaagtctgcacgtggatattttgaccacttagaggccttcgttggaaacgggtttttttcctgtaaggctagacagaagcattcccagtaacttccttgtgttgtgtgcattcaactcacagagatgaacgttcccttagacagagcagatttgagacactctatttgtgcaatttgcaagtgtagatttcaagcgctttaaggtcaatggcagaaaaggaaatatcttcgtttcaaaactagacagaatcattcccacaaactgcgtagtgatgtgttcgttcaacttacagagtttaacctttctgttcatagagcagttaggaaacactctgtttgtaaagtccgtaagtggatattctgacatcttgtggccttgtttggaaaccggacttcttcatatactgctagacagaagaattctcagtaacttccttgtgttgtgtgtattcaactcacagagttgaacgatcctttacacagagcagacttgaaacactctttttgtggaatttgcaagtggagatttcagccgctttgaggtcaatggtagaaaaggaaatatcttcgtagaaaaactagacagaacgattctcagaaactcctttgtgatgtgtgcgttcaactcacagagtttaacttttcttttaatatagcagttaggaaacactctgtttgtaaagtctgcaagtggatattcagacctctttgaggccttcgttggaaacgggatttcttcatattctgttagacagaagaattctcagtaacttcccttgtgttttgtgtattcaactcacagagttgaacgatcctttacacagagcagacttgaaacactctttttgtggaatttgcaagtggagatttcagccgctttcaggtcaatagtagaaaaggaaatatcttcgtagaaaaactagacagaatgattctcagaaactcctttgtgatgtgtgcgttcaactcacagagtttaacctttcttctcatagagcagttaggaaacactctgtttgtaaagtctgcaagtggatattcagacatctttgaggccttcgttggaaacgggatttcttcatgttctgctagacagaagaattctcagtaacttccttgtgttgtgtgtattcaactgacagagttgaactttcatttagagagagcagatttgaaactctgtttttgtggaatttgcaagtggagatttcaagcgctttggggccaaaggcagaaaaggaaatatcttcgtacaaaaactagacagaatcattatcagaaactgctgcgtgatgtgtgcgttcaactctcagagtttaacttttcttttcattcagcggtttggaaacactctgtttgtaaagtctgcacgtggaaattttgaccacttagaggccttcgttggaaacgggtttttttcatgtaaggctagacagaagaattcccagtaacttccttgcgttgtgtacattcaactcacagagttgaacgttcccttagacagagcagatttgaaacactctttttgttcaattggcaagtggagatttcaagcgctttaaggtcaatggcagaaaaggaaatatcttcgtttcaaaactagacagaatcattcccacaaactgcgttgtgatgtgttcgttcatctcacagagtttaacctttcttttcatagagcagttaggaaacagtctgtttgtaaattctgtaagtggatattccgacatcttgtggccttcgttggaaacgggatttcttcatattctgctagacagaagaattctcagtaacttccttgtgttgtgtgtattcaactcacagagttgaacgatcctttacacagagcagacttgaaacactctttgtgtggaatttgcaagtggagatttcagccgctttgaggtcaatagtagaaaaggaaatatcttcgtagaaaaactagacagaatgattctcagaaactcctttgagatgtgtgtgttcaactcacagagtttaacctttcttttcatagagcagttaggaatcactctgtttttaaagtctgcaagtggatattcagacctctttgaggccttcgttggaaaagggtttttttcatataaggctagagagaagaattcccagtaccttccttgtgttgtgtgtgttcaactcacagatttgaactttcatttacacagagcagatttgaaacactctttttgtggaatttgcaaatggagatttcaagcgctttgaggccaaaggcagaaaaggaaatatcttcgtataaaaactagacagaatcattctcagaaactgctgtgtgatgtgtgcgttcaactctcagagtttaacttttcttttcattcagcggtttggaaacactctgtttgtaaagtctgcacgtggatattttgaccacttagaggccttcgttggaaacgggattttttcatgtaaggctagacagaagaattcccagtaacttccttgtgttgtgtacattcaactcacagagttgaacgttcccttagacagagcagatttgaaacactctttttgtgcaattggcaagtggagatttcagccgctttgaagtcaaatgtagaaaaggaaatatcttcctataaaaactagacagaatcattcccacaaactgcgttgtgatgtgtacgttcaactcacagagtttaacctttctgttcatagagcagttaggaaacactctgtttgtaaagtctgtaagtggatattctgacatcttgtggccttcgttggaaacgggatttcttcatattctgctagacagaagaattctcagtaacttccttgtgttgtgtgtattcaactcacagagttgaacgatcctttacacagagcagacttgtaacactctttttgtggaatttgcaagtggagatttcagccgctttgaagtcaaaggtagaaaaaaaatatcttcctataaaaactagacagaatgattctcagaaactcctttgtgatgtgtgccgttcaactcacagagtttaacctttcttttcatagagcagttaggaaacactctgcttgtaaagtctgcaagtggatattcagccctctttgaggccttcgttggaaacgggtttttttcatataaggctagacagaagaattctcagtaacttccttgtgttgtgtgtattcaactgacagagttgaactttcatttagagagagcagatttgaaacactgtttttgtcgaatttccaatggagatttcaagcgctttggggccaaaggcagaaaaggaaatatcttcgtataaaaactagacagaatcattctcagaaactgctctgtgatgtgtgcgttcaactctcagagtttaacttttcttttcattcagcagtttgaaacactctgtttgtaaactctgcacgtggataattggaccacttagaggccttcgttggaaaagggtttttttcctgtcaggctagacagaagaattcccagtaatttccttgtgttgtgtacattcaactcacagagttgaacgttcccttagacagagcagatttgaaacactctttttgtgcaattggcaaatggagatttcaagcgctttaaggtcaatggcagaaaaggaaatatcttcgtttcaaaactagacagaatgattctcagaaactccttagtgatgtgtgcgttcaactcacaaagtttaacctttctgttcatagagcagttaggaaacactctgtttgtaaagtctgcaagtggatattcagacctccttgaggccttcgttggaaacgggatttcttcatattctgctagacagaagaattctcagtaacttccttgtgttgtgtgtattcaactcacagagttgaacgatcctttacacagagcagacttgaagcactctttttgtggaatttgcaagtggagatttcagccgctttgaggtcaatagtagaaaggaaatatcttcgtagaaaaactagacagaatgattctcagaaaatcctttgtgatgtgtgcgttcaactcacagagtttaacttttcttttcatagagcagttaggaaacactctgtttgtaacgtctgcaagtggatattcagacctccttgaggccttcgttggaaacgggatttcttcatattctgctagacagaagaattctcagtaacttccttgtgttgtgtgtattcaactgacagagttgaactttcatttagagagagtagttttgaaacacttttttttgtggaatttgcaagtggagatttcaagcgctttggggccaaaggcagaaaaggaaatatcttcgtataaaaactagacagaatcattctcagaaactgctgcgtgatgtgtgcgttcaactcacagagtttaacttttcttttcattcagcggtttggaaacactctgtttgtaaagtctgcacgtggaaattttgaccacttagaggccttcgttggaaacgggtttttttcatgtaaggctagacagaagaattcccagtaacttccttgtgttgtgtgcattcaactcacagagatgaaagttcccttcgacagagcagatttgaaacactctatttgtgccatttgcaagtgtagatttcaagcgctttaaggtcaatggcagaaaaggaaatatcttcgtttcaaaactagacagaatcattcccacaaactgcgttgtgatgtgttcgttcaactcacagagtttaacctttcttttcatagagcagttaggaaacagtctgtttgtcaattctgtaagtggatattctgacatcttgtggctcttcgttggaaacgggatttcttcatattctgctagacagaagaattcccagtaacttccttgtgttgtgtacattcaactcacagagttgaacgttcccttagacagagcagacttgtaacactctttttgtggaatttgcaagtggagttttcagccgcttttaagtcaatggtagaaaaggtaatatcttcctataaaaactagacagaatgattctcagaaactcctttgtgatgtgtgcgttcaactcacagagttcaacctttcttttcatagagtagttggaaaacactctgtttgtaaagtctgcaagtggatattcagacttctttgaggccttcgttggaagcgggatttcttcatattctgctagacagaagaattctcagtaacttccttgtgttgtgtgtattcaactgacagagttaaactttcatttagagagagcagatttgaaacactgtttttgtggaatttgcaagtggagatttcaagcactttggggccaaaggcagaaaactaaatatcttcgtataaaaactagacagaatcattctcagaaactgctgcatgatgtgtgcgttcaactctcagagtttaacttttcttttcattcagcggtttggaaacactctgtttgtaaagtctgcacttggatattttgaccacttagaagccttcgttggaaacgggtttttttcatataaggctagacagaagaattcccagtaacttccttgtgttgtgtgcattcaactcacagagttgaacgttcccttagacagagcagatttgaaacactctatttgtgcaatttgcaagtgtagatttcaagcgctttaaggtcaacggcagaaaaaggaaatatcttcgtttcaaaactagacagaatcattcccacaaactgcgttgtgatgtgttcgttcaactcacagactttaacctttcttttcatagagcagttaggaaacagtctgtttgtcaattctgtaagtggatattctgtcatcttgtggccttcgttggaaacgggatttcttcatattctgctagacagaagaattctcagtaacttccttgtgttgtgtgtattcaactcacagagttgaacgatcctttacacagagcagacttgtaacactctttttgtggaatttgcaagtggagatttcagccgctttgaagtcaaaggtagaaaaggaaatatcttctctataaaaactagacagaatgattctcagaaactcctttgtgatgtgtgcgttcaactcacagagtttaacttttcttttcatagagcagttaagaaacactctgtttgtaatgtctgcaagtggatattcagacctccttgaggccttctttggaaacgggatttcttcatattctgctagacagaataattctcagtaacttccttgtgttgtgtgtattcaactgacagagttgaactttcatttagagagagcagatttgaaacactgtttttgtggaatttgcaagtggagatttcaagcgctttggggccaaaggcagaaaaggaaatatcttcgtataaaaactagacagaatgattctcagaaactcctttgtgatgtgtgccttcaactcacagagtttaacctttcttttcatagagtagttaggaaacactctgtttgtaaagtctgcaagtggatattcagacctctttgaggccttcgttggaaacgggtttttttcatataaggctagacagaagaattctcagtaacttccttgtgttgtgtacattcaactcacaagagttgaacgttcccttagacagagcagatttgaaacactctttttgtgcaattggcaagtggtgatttcagccgctttgaggtcaatggtagaaaaggaaatatcttcgtataaaaactagacagaatcatccccataaactgcgttgtgatgtgttcgttcaactcacagagtttaacctttcttttcatagagcagttaggaaacagtctgtttgtcaattctgtaagtggatattctgacatcttgtggccttagttggaaacgggatttcttcatattctgctagacagaagaattctcagtaacttccttgtgttgtgtgtattcaactcacagagttgaacgatcctttacacagagcagacttgaaaaactctttttgtggaatttgcaagtggagatttcagccgctttgagttcaatggtagaataggaaatatcttcctatagaaactagacagaatgattctcaaaaactcctttgtgatgtgtacgttcaactcacagagtttaacctttcttttcatagagcagttaggaaacactctgtttgtaaagtctgcaagtggatattcagacctctttgaggccttcgttggaaacgggtttttttcatataaggctagacagaagaattctcagtaacttccttgtgttgtttgtattcaactcacagagttgaactttcatttacacagagcagatttgaaacactctttttgtggaatttgcaaatggagatttcaagcgctttgaggccaaaggcagaaaaggaaatatcttcgtataaaaactagacagaatcattctcagaaactgctctgcgatgtgtgcattcaactctcagagtttaatttttcttttcattcagcagtttggaaacattctctttgtgaagtctgcacgtggatattttgaccacttagaggccttcgttggaaacgggttttattcttgtaaggctagacagaagaattctcagtaacttccttgtgttgtgtgtattcaactcacagagtggaacgatcctttacacagagcagacttgaaacactctttttgtggaatttgcaagtggagatttctgccgctttgaggtcaattgtagaataggaaatatcttcctatagaaactagacagaatgattctcagaaactcatttgtgatgtgtgcgttcaactcacagagtttaacctttcttttcatagagcagttaggaaacactctgtttgtaaagtctgcaagtggatattcagacctctttgtggccttcgttggaaacgggatttcttcatatgatgctagacagaagaattctcagaatcttccttgtgtggtgtgtattcaactcacagagttgaacgatggtttacacagagcagatttgaaacactctttttgtggaatttgcaagtggagatttcagccgctttgaggtcaatggtagaaaaggaaatatcttcgtataaaaactagacagaatgattctcaggaaactcctttgtgatgtgtgtgttcaactcacagagtttaacctttcttttcatagagcagttaggaaacactctgtttgtaaagtctgcaagtggatattcagacctctttgaggccttcgttggaaacgggtttttttcatataaggctagacagaagaattcccagtaacttccttgtgttgtgtgtgttaaactcacagagttgaacttccatttacacagagcagatttgaaacactctttttgtggaatttgcaagtggagatttcaagcgctttgaggccaaaggcagaaaaggaaatatcttcgtttcaaaactagacagataatcattctcagaaactgctctgcgatgtgtgcgttcaactctcagagtttaacttttcttttcattcagcagtttggaaacactctgtttgtaaagtctgcaggtggatattttgaccactcagaggccttcgttggaaacgggtttttttcctgtaaggctagacagaagaattcccagtaacttccttgtgttgtgtgcattcaagtcacagagttgaacgttcccttagacagagcagatttgaaacactctatttgtgcaatctccaagtgtagatttcaagcgctttaaggtcaacggcagaaaagataatatcttcgtttcaaaactagacagaatcattcccacaaactgcgttgtgatgtgttcgttcaactcacagagtttaacctttctgttcatagtgcagttaggaaacactctgtttgtaaagtctgtaagtggatattctgacatcttgtggccttcgttggaaacgggatttcttcatattctgctagacagaagaattctcagtaacttccttgtgttgtgtgtattcaactcacagagttgaacgatcctttacacagagcagacttgaaacactctttttgtggaatttgcaagtggagatttcagccgctttgtggtcaatggtagaaaaggaaatatcttcgtataaaaactagacagaatgattctcagaaactcctttgtgatgtgtgcgttcaactcacagagtttaacctttcttttcatagagcagttaggaaacactctgtttgtaaagtctgcaagtggatattgagacctccttgaggccttcgttggaaacgggatttcttcatattatgctagacagaagaattcccagtaacttccttgtgttgtgtgtgttcaactcacagagttgaactttcatttacacagagcagatttgaaacactctttttgtggaatttgcaggtggagatttcaagccctttgaggccaaaggcagaaaaggaaatatcttcgtataaaaactagacagagtcattctcagaaactgctgcgtgatgtgtgcgttcaactctcagagtttaacttttcttttcattcagcggtttggaaacactctgtttgtaaagtctgcatgtggaaattttgaccatttagaggccttcgttggaaacgggtttttttcatgtaaggctagacagaagaattcccagtaacttccttgtgttgtgtacattcaactcacagagttgaacgttcccttagacagagcatatttgaaacactctttttgtgcaattggcaagtggagatttcaagcgctttaaggtcaatgggagaaaaggaaatatcttcgtttcaaaactagacagaatcattcccacaaactgcgttgtgatgtgttcgttcatctcacagagtttaacctttcttttcatagagcagttaggaaacagtctgtttgtaaattctgtaagtggatattctgacatcttgtggccttcgttggaaacgggatttcttcatattctgctagacggaagaattctcagtaacttccttgtgttgtgtgtattcaactcacagagttgaacgatcctttacacagagcagccttgaaacactctttttgtggaatttgcaagtggagatttcagccgctttgaggtcaatggtagaataggaaatatcttcctatagaaactagacagaatgattctcagaaactcctttgtgatgtgtgtgtccaactcacagagtttaacctttcttttcatagagcagttagtaaacactctgtttataaagtctgcaagtggatattcagacccctttgaggccttcgttggaaacgggatttcttcatattatgctagacagaagaattctcagtaacttccttgtgttgtgtgtgttcaactcacagagttgaactttcatttacccagagcagatttgaaacactctttttgtggaatttgcaagtggagatttcaagcgctttgaggccaaaggcagaaaaggaaatatcttcgtttcaaaactagacagaatcattctcagaaactgctcggcgatgtgtgcattcaactctgagagtttaacttttcttttcattcagcagtttcgaaacactctgtttgtaaagtctgcacgtggatattttgaccacttagaggccttcgttggaaacgggtttttttcatgtaaggctagacagaagaatttcctgtaagttccttgtgttgcgtgcattcaactcacagagttgaacgttcccttagacagagcagatttgaaacactctttttgtgcaattggcaagtggagatttcaagcgatttaaggtcaatggcagaaaacgatataccttcatttcaaaactagacagaaatcattcccacaaactgcgttgtgatgtgttcgttcaactcacagagtttaacctttctgttcatagagcagttaggaaacactctgtttgtaaagtctgtaagtggatattctgacatcttgtggcctttgttggaaacgggatttcttcatattctgctagacagaagaattctcagtaacttacttgtgttgtgtgtgttcaactcacagagttcaacgatcctttacacagagcagacttgaaacactctttttgtggaatttgcaagtggagatttcagccgctttgaggtcaatggtagaaaaggaaatatcttcgtataaaaactagacagaatgattctcagaaactcctttgtgatgtgtgcgttcaactcacagagtttaacctttcttttcatagagcagttgggaaacactctgtttgtaacgtctgcaagtggatattcagacatccttgaggctttcgttggaaacgggatttcttcatattctgctagaaagaagaattcccagtaacatccttgtgttgtgtgtgttcaactcacaaagttgaactttcatttacacagagcagatttgaaacactctttttgtggaatttgcaaatggagatttcaagcgctttgaggccaaaggcagaaaaggaaatatcttcgtataaaaactagacagaaatcattctcagaaactgctctgcgatgtgtgcgttcaactctcaggagtttaacttttcttttcattcagcagtttggaaacactctgtttgtaaagtctgcacgtggatattttgaccacttagaggccttcgttggaaacgggtttttttcctgtaaggctagacagaataattcccagtaacttccttgtgttgtgtacattcaactcacagagttgaacgttcccttagacagagcagatttgaaacactctttttgtgaaattggcaagtggagatttcaagcgctttaaggtcaatggcagaaaaggaaatatcttcgtttcaaaactagacagaatgattctcagaaactcctttgtgatgtgtgcgttcaactcacagagtttaacctttctgttcatagagcagttgggaaacactctgtttgtaaagtctgcaagtggatattcagacctctttgaggccttcgttggaaacgggatttcttcatattctgctagacagaagaattctcagtaacttcccttgtgttgtgtgtattcaactcacagagttgaatgatcctttacacagaacagacttgaaacactctttttgtggaatttgcaagtggagatttcagccgctttgaggtcaatggtagaataggaaatatcttcctatagaaactagacagaatgattctcagaaactcctttgtgatgtgtgcgttcaactcacagagtttaacctttgttttcatagagcagttaggaaacactctgtttgtaatgtctgcaagtggatattcagacatctttgaggctttcgttgtaaacgggatttcttcatattctgctatacagaagaattcccagtaacttcccttgtgttgtgtgtgttcaactcacagagttgaactttcatttacacagagcagatttgaaacactctttttgtggaatttgcaagtggagatttcaagggctttgaggccaaaggcagaaaaggaaatgtcttcgtttcaaaactagacagaatcattctcagaaactgctctgcgatgtgtgcgttcaactctcagagtttaacttttcttttcattcagcagtttggaaacactctggttgtaaagtctgcacgtggatattttgaccacttagaggccttcgttggaaacgggtttttttcctgtaaggctagacaaaagaattcccagtaacttcctcgtgttgtgtgcattcaactcacagagttgaacgttcccttagacagagcagatttgaaacactctatttgtgcaattggcaagtgtagatttcaagcgctttaaggtcaatggcagaaaaggaaatatcttcgtttcaaaactagacagaatcattcccacaaactgcgttgtgatgtgttcgttcaactcacagagtttaacctttccgttcatagagcagttaggaaacactctgtttgtaaagtctgaaagtggatattctgacatcttgtggccttcgttggaaacgggatttcttcatattctgctagacagaataattctcagtaacttctttgtgttgtgtttattcagctgacagagttgaacgatcctttacagagagcagacttgaaacactctttttgtggaatttgcaagtggagatttcagccgctttgaggtcaatggtagaataggaaatatcttcctatagaaactagacagaatgattctcagaaactcctttgtgatgtgtgcgttcaactcacagagtttaacctttcttttcatagagcagttaggaaacactctgtttgtaaagtctgcaagtggatattcagacctctttgaggccttcgttggaaaagggtttttttcatataaggctagacagaagaattctcagtaacttccttgtgttgtgtgtattcaactgacagagtttaactttcatttagagagagcagatttgaaaacctgtttttgtggaatttgcaagtggagatttcaagcgctttggggccaaaggcagaaaaggaaatatcttcgtataaaaactaaacggaattattctcagaaactcctttgtgatgtgtgcgttcaactcacagaatttaacctttcttttcatagagcagttaggaaacactctgtttgtaaagactgcaagtggatattcagacctctttgaggccttcgttggaaacgggtttttttcctgtaaggctagacagaagaattcccagtaacttccttgtgttgtgtacattcaactcacagagttgaacgttcccttagacagagcagatttgaaacactctttttgtgcaattggcaagtggagatttcaagcgctttaaggtcaatggcagaaaaggaaatatcttcgtttcaaaacaagacagaatcattcccacaaactgcgttgtgatgtgttcgttcaactcacagagtttaacctttcttttcatagagcagttaggaaacagtctgtttgtaaattttgtaagtggatattctgacatcttgtggccttcgttggaaacgggatttcttcatattctgctagacagaagaattctcagtaacttccttgtgttgtgtgtattcaactcacagagttgaaggatcctgtacacagagcagtcttgaaacactctttttgtggaatttgcaagtggagatttcagccgctttgaggtcaatagtagaaaaggaaatatcttcgtagaaaaactacacagaatgattctcagaaactcctttgtgatgtgtgcgttcaactcacagagtttaacctttcttttcatagagcagttaggaaacactctgtttgtaaggtctgcaagtggatattcagacatctttgaggctttcgttgcaaacgggttttcttcatattctgctacacagaagaattctcagaaacttccttgtgttgtgtgatttcaactcacagagttgaacgatgctttacacagagtagacttgaaacactctttttgtggaatttgcaagtggagatttcagccgctttgtggtcaatggttgaaaaggaaatatcttcgtataaaaactagacagaatgattctccgaaactcctttgtgatgtgtgcgtacaactcacagagtttaacctttcttttcatagagcagttaggaaacactctgtttgtaaagtctgcaagtggatattcagacctctttgaggccttcgttggaaacgggatttcttcatattctgctagacagaagaattcccagtaacttgccttgtgttgtgtacattcaactcacagagttgaacgttcccttagacagagcagatttgaaacactctttttgtgcaattggcaaatggagatttcaagcgctttaaggtcaatggcagaaaaggaaattgttcgtttcaaaactagacagaatcattcccacaaactgcgttgtgatgtgttcgttcaactcacagagtttaacatttctgttcatagagcagttaggaaacactctgtttgtaaagtctgtatgtggatattctgacatcttgtggccttcgttggaaacgggatttcttcatattctgctagacagaagaattctcagtaacatctttgtgttgtgtgtattcaactcacagagttgaacgatcctttacacagagcagacttgaaacactctttttgtggaatttgcaagtggagatttcagccgctttgaggtcaatggtagaataggaaatatcttcctatagaaactagacagaatgattctcagaaactcctttgtgatgtgtgcgttcaactcacagagtttaacctttcttttcatagagcagttaggaaacactctgtttctaaagtctgcaagtggatattcagccctctttgaggccttcgttggaaacgggtttttttcatataaggctagagagaagaattcccagtaacttccttgtgttgtgtgtgttcaactcacagagttgaactttcatttacacagagcagatttgaaacactctttttgtggaatttgcaagtggagatttcaagcgctttgaggccaaaggcagaaaaggaaatatcttcgtagaaaaactaggcagaaatcattctcagaaactgctctgcgatgtgtgcgttcaactctcaggagtttaacttttcttttcattcagcagtttggaaacactctgtttgtaaagtctgcacgtggatattttgaccacttagaggccttcgttggaaacgggtttttttcctgtaaggctagacagaagaattcccagtaacttccttgtgttgtgtacattcaactcacagagttgaacgttcccttagacagagcagatttgaaacactctttttgtgcaattggcaagtggagatttcaagcgctttaaggtcaatggcagaaaaggaaatatcttcgtttcaaaactagacagtatcattcccacaaactgcgttgtgatgtgttcgttcaactcacagagtttaacctttctgttcatagagcagttaggtaacactctgtttgtaaagtctgccagtggatattcggacctccttgaggccttcgttggaaacgggatttcttcatattctgctagacagaagagttctcagtaacttttttgtgttgtgtgtattcaactcacagagttgaaccttgctttagagagagcagatttgaaacactctttttgtggaatttgcaagtggagatttcagccgctttgagttcaatggtagaataggaaatatcttcctatagaaactagacagaatgattctcagaaactcctttgtgatgtgtgcgttcaactcacagagtttaacctttcttttcatagagcagttaggaaacactctgtttgtaaagtctgcaagtggatattcagacctctttgaggccttcgttggaaacgggatttcttcatattctgctagacacaagaattctcagaaacttccttgtgttgtgtgttttcaactcacagagttgaacgatcctttacacagagcagacttgaaacactctttttgtggaatttgcaagtggagatttcagccgctttgaggtcaatggtagaataggaaatattttcctatagaaactagacagaatgattctcagaaactcctttgtgatgtgtgcgttcaactcacagagtttaacctttcttttcatagagcagttaggaaacactctgtttgtaaagactgcaagtggatattcagacctccttgaggccttcgttggaaacaggatttcttcatattatgctagacagaagaattctcagtaacttccttgtgttgtgtgtattcaactcacagagttgaacaatcctttacacagagcagacttgaaacactctttttgtggaatttgcaagtggagatttcagccgctttgaggtcaatggtagaataggaaatatcttcctatagaaactagacagaatcattctcagaaactgctctgcgatgtgtgcgtacaactctcagactttaacttttcttttcattcagcagtttggaaacactctgtttgtaaagtctgcacgtggataatttgaccacttagaggccttcgttggaaacgggtttttttcatgtaaggctagacagaagaattcccagtaacttccttgtgttgtgtgcattcaactcacagagttgaacgtttccttagacagagcagaattgaaacactctatttgtgcaatttgcaagtgtagatttcaagcgctttaaggtcaatggcagaaaaggaaatatcttcgtttcaaaactagacagaatcattcccacaaactgcgttgtgatgtgttcgttcaactcacagagtttaacctttcttttcatagagcagttaggaaacagtctgtttgtcaattctgtaagtggatattctgacatcttgtggccttcgttggaaacggggtttcttcatattctcctagacagaagaattctcagtaacttccttgtgttgtgtgtattcaactcacagagttgaacgatcctttacacagagcagattagaaacacttcttttgtggaatttgcaagtggagatttcagccgcgttgaggtcaatggtagaaaaggaaatatcttcgtataaaaactagacagaatgattctgagaaactcctttgtgatgtgtgcgttcaactcacagagtttaacctttcttttcatagagcagttaggaaacactctgtttgtaaagtctgcaagtggatattcagatctccttgaggccttctttggaaacgggatttcttcatattatgctagacagaagaattcccagtaacttccttgtgttgtgtgtgtagaactcacagagttgaactttcatttagacagagcagatttgaaacactctttttgtggaatttgcaaatggagaattcatgcactttgaggccaaaggcagaaaaggaaatatcttcgtataaaaactagacagaatcattctcagaaactgcggcgtgatgtgtgcgttcaactctcagagtttaacttttcttttcattcagcggtttggaaacactctgtttgtaaagtctgcacgtggatattttgaccacttagaggccttcgttggaaacgggtttttttcatgtaaggctagacagaagaattcccagtaacttccttgtgttgtgtacattcaactcacagagttgaacgttcccttagacagagcagatttgaaacactctttttgtgcaatttgcaagtggtgatttcagccgctttgaggtcaatggtagaaaaggaaatatcttcgtataaaaactagacagaatcattcccacaaactgcgttgtgatgtgttcgttcaactcacagagtttaacctttcttttcatagagcagttaggaaacagtctgtttgtaaattctgtaagtggatattctgacatcttgtggcgttcgttggaaacgggatttcttcatattctgctagacagaagaattctcagtaacttccttgtgttgtgtgtattcaactcacagagttggacgatcctttacacagagcagacttgaaacactctttttgtggaatttgcaagtggagatttcagccgctttgaggtcaatagtagaaaaggaaatatcttcgtagaaaaactagacagaatgattctcagaaacttctttgtgatgtgtgtgttcaactcacagagtttaacctttcttttcatagagcagttagtaaacactctgtttataaagtctgcaagtggatattcagacccctttgaggccttcgttggaaacgggatttcttcatattatgctagacagaacaattcccagtaacttccttgggttgtgtgtgttcaactcacagagttgaactttcatttacacagagcagatttgaaacactctttttgtggaatttgcaagtggagatttcaagcgctttgaggccaaaggcagaaaaggaaatatcttcgtataaaaactagacagaatcattctcagaaactgctctgcgatgtgtgcgttcaactctcagagtttaacttttcttttcattcagcagtttggaaacactctgtttgtaaagtctgcacgtggataatttgacaacttagaggccttctttggaaacgggtttttttcatgtaaggctagacagaagaattcccagtaacttccttgtgttgtgtacattcaactcacagagttgaacgttcccttagacagagcagatttgaaacactctttttgtgcaattggcaagtggtgatttcagccgctttgaggtcaatggtagaaaaggaaatatcttcgtataaaaactagacagaatgattctcagaaacttctttgtgatgtgtgcgttcaactcacagagtttaacctttcttttcacagagcagttaggaaacactctgtttgtaaactctgcaagtggatattcagacctctttgaggccttcgttggtaacgggatttcttcatactatgctagacagaagaattctcagtaacttccttgtgttgtgtgtattcaactcacagagttgaacgatcctttacacagagcagacttgtaacactctttttgtggaatttgcaagtggagatttcagccgctttgaagtcaaaggtagaaaaggaaatatcttcctataaaaactagacagaatgattctcagaaacttcattgtgatgtgtgcgttcaactcacagagtttaacctttcttttcatagagcagttaggaaacaccgtttgtaaactctgcaagtggatattcagacctctttgaggccttcgttggaaacgggatttcttcatactgtgctagacagaagaattctcagtaacttctttgtgttgtgtgtattcaactgacagagttgaactttcatttagagagagcagatttgaaacactgtttttgtggaatttgcaagtggagatttcaagcgctttggggccaaaggcagaaaaggaaatatcttcgtataaaaactagacagaatcattctcagaaactgctgcgtgatgtgtgcgttcaactctcagagtttaacttttcttttcattcagcggtttggaaacactctgtttgtaaagtctgcacgtggatattttgaccacttagaggccttctttggaaacgggtttttttcaagtaaggctagacagaagaattcccagtaacttccttgtgttgtgtgcattcaactcacagatttgaacgttccctagacggagcagatttgaaacactctatttgtgcaatttgcaagtgtagatttcaagcgctttaaggtcaatggcagaaaagggaatatcttcgtttcaaaactagacagaatcattcccacaaactgcgttgtgatgtgttcgttcaactcacagagtttaacctttctgttcatagagcagtgaggaaacactctgtttgtaaagtctgtaagtgggtattctgacatcttgtggccttcgttggaaacgggatttcttcatattctgctagacagaagaattctgagtaacttccttgtgttgtgtgtattcaactcacagagttcaacgatcctttacacagagcagactagaaacacccttttgtggaatttgcaagtggagatttcagccgctttgaggtcaattgtagaaaaggaaatatcttcgtataaaaactagacagaatgattgtcagaaactcctttgtgctgtgtgcgttcaactcacagagtttaaactttcttttcatagagcagttaggaaacactctgtttgtaaagtctgcaggtggatattcagacatcattgaggctttcgttggaaacgggatttcttcatattctgctagacagaagaattctcagtaacttccttgtgttgtgtgtattcaactgacacagttgaactttcatttagagagagcagatttgaaacactgtttttgtggaatttgcaagtggagatttcaagcgctttggggccaaaggcagaaaaggaaatatcttcgtataaaaactagacagaatgattctcagaaactcctttgtgatgtgggcgttcaactcacagagtttaacctttcttttcatagagccgttaggaaacactctgtttgtaaattctgcacgtggatatttggacttcttagaggccttcgttggaaacgggtttttttcatgtaaggctagacggaagaattcccagtaacttccttgcgttgtgtacattcaactcacagagttgaacgttcccttagacagagcagatttgaaacactctttttgtgcaattggcaagtggagatttcaagcgctttaaggtcaatggcagaaaaggaaatatcttcgtttcaaaactagacagaatcactcccacaaactgcgttgtgatgtgttcgttcaactcacagagtttaacctttcttttcatagagcagttaggaaacagtctgtttgtaaattctgtaagtggatattctgacatcttgtggccttcgttggaaacgggatttcttcatattctgctagacagaagaattctcagtaacttccttgtgttgtgtgtattcaactcacagtagttgaacgatcctttacacagagcagacttgaaacactctttttgtggaatttgcaaggggagatttcagccgctttgagttcaatggtagaataggaaatatcttcctatagaaactagacagagtgattctcagaaacttctttgtgatgtctgcgttcaactcacagagtttaacctttcttttcatagagcagttaggaaacactctgtttgtaaagtctgcaagtggatagtcagacctccttgaggccttcgttggaaacgggatttcttcatattctgctatacagaagaattctcagtaacttccttgtgttgtttgtattcaactgacagagttgaactttcatttacagagagcagatttgaaacactgtttttgtggaatttgcaagtggagatttcaagcgctttttggccaaaggcagaaaacgaaatatcttcgtataaaaactagacagaatcattctcagaaactgctgcgtgatgtgtgcgttcaactctcagagtttaacttttcttttcattcagcggttctgaaacactctgtttgtaaagtctgcacgtggatattttgaccacttagaggccttcgttggaaacgggtttttttcatgtaaggctaggcagaagaattcccagtaacttccttgtgttgtgtgcattcaactcacagagttgaacgttccttagacagagcagatttgaaacactctatttgtgcaatttgcaagtgtagatttcaagcgctttaaggtcaatggcagaaaaggaaatatcttcgtttcaaaactagacagaatcattcccacaaactgcgttgtgatgtgttcgttcaactcacagtgtttaacctttccgttcatagagcagttaggaaacactctgtttgtaaagtctataagtggatattctgacatcttgtggccttcgttggaaacgggatttcttcatattctgctagacagaagaattctcagtaacttccttgtgttgtgtgtattcaactcacagagttgaacgatcctttacacagagcagacttgaaacactctttttgtggaatttgcaagtggagatttcagccgctgtgagttcaatggtagaataggaaatatcttcctatagaaactagacagaatgattctcagaaactcctttgtgatgtgtgtgttcaactcacagagtttaacctttcttttcatagagcagttaggaaacactctgtttgtaaagtctgcaagtggatattcagacctctttgaggccttcgttggaaacgggatttcttcatattctgctagacagaagaattcccagtaacttccttgtgttgtgtgtgttcaactcacagagttgaactttcatttacacagagcagatttgaaatactctttttgtggaatttgcaagtggagatttcaagcgctttgaggccaaaggcagaaaaggaaatatcttcgtataaaaactagacagaatcattctcagaaactgctctgcgatgtgtgcgttcaactctcagagtttaacttttcttttcattcagcagtttgtaaacactctgtttgtaaagtctgcacgtggatattttgaccacttagaggcctttgttggaaacgggtttttttcctgtaaggctagacagaagaattcccaggaacttccttgcgttgtgtacattcaactcacagagttgaacgttcccttagacagagcagatttgaaacactctttttgtgcaattggcaagtggagatttcaagcgctttaaggtcaatggcagaaaaggaaatatcttcgtttcaaaactagacagaatcattctcagaaactgctgcgtgatgtgtgcgttcaactctcagagtttaacttttcttttcattcagcggtttggaaacactctgtttgtaaagtctgtaagtggatattctgacatcttgtggccttcgttggaaacgggatttcttcatattctgctagacagaagaattctcagtaccttccttgttttgtgtgtattcaactcacagagttgaacgatcctttacgcagagcagacttgaaacactctttttgtggaatttgcaagtggagatttcagccgctttgaggtcaatggtagaaaaggaaatatcttcgtataaagactagacagaatgattctcagaaactcctttgtgatgtgtgcgtttaactcacagagtttaacctttcttttcatagagcagttaggaaacactctgtttgtaaagtctgcaagtggatattcagacatccttgaggctttcgttggaaacgggatttcttcatattctgccagaaagaagaattcccagtaacttccttgtgttgtgtgtgttcaactcacagagttgaactttcatttacacagagcagatttgaaacactctttttgtggaatttgcaagtggagatttcaagcgctttgaggccaaagcagaaaaggaaatatcttcgtttgaaaactagacagaatcattctcagaaactgctctgcgatgtgtgcgttcaactctcagagtttaacttttcttttcattcagcagtttggaaacactctgtttgtaaagtctgcacgtggataacttgaccacttagaggccttcgttggaaacgggtttttttcatgtaaggctagacagaagaattcccagtgacatccttgtgttgtgtgcattcaactcacagagttgaacgttcccttagacagagcagatttgaaacactctatttgtgcaatttgcaagtgtagatttcaagcgctttaacgtcaatggcagaaaaggaaatatcttcgttttaaaactagacagaatcattcccacaaactgcattgtgatgtgttcgttcaactcacagagtttaacctttctgttcatagagcagttaggaaacactctgtttgtaaagtctgcaagtggatattcagacctctttgaggccttcgttggaaacgggatttcttcatattctgctagacagaagaattctcagtaacttccttgtgttgtgtgtattcaactcacagagttgaaggatcctttacagagagcaggcttgaaacactctttttgtcgaatttgcaagtggagatttcagccgctttgaggtcaatggtagaatagggaatatcttcttatagaaactagacagaatgattctcagaaactcctttgtgatgtgtgtgttcaactcacagagtttaacctttcttttcatagagcagttagtaaacactctgtttataaagtctgcaagtggatattcagacccctttgaggccttcgttggaaatgggatttcttcatattatgctagacagaagaattctcagtaactttccttgtgttgtgtgtattcaactgacagagttgaactttcatttagagagagcagatttgaaacactctttttgtggaatttgcaagtggagatttcaagcgctttggggccaaaggcagaaaaggaaatatcttcgtataaaaactagacagaatcattctcagaaactgctctgtgatgtgtgcgttcaactctcagagtttaacttttcttttcattcagcagtttggaaacaatctgtttgtaaagtctgcacgtggatattttgaccacttagaggccttcgttggaaacgggtttctttcctgtaagggtagacagaagaattcccagtaacttccttgtgttgtgtgcattcaactcacagagttgaacgttcccttagacagagcagatttgaaacactctatttgtgcaatttgcaagtgtagttttcaagctctttaaggtcaacggcagaaaaggaaatatcttggtttcaaaactagacagaatcattcccacaaactgcgttgtgatgtgttcgttcaactcacagagtttaacctttctgttcatagagcagttaggaaacaatctgtttgtaaagtctgcaagtggatattcagacctccttgaggccttcgttggaaacgggatttcatcatattatgctagacagaagaattctcagtaacttccttgtgttgtgtgaattcacctcacagagttgaacgatcgtttacacagagcagacttgaaacactctttttgtggaatttgcaagtggagatttcagccgctttgtggtcaatagtagaataggaaatatcttcctatagaaactagacagaatgattctcagaaagtcctttgtgatgtgtgcgttcaactcacagagtttaacctttctgttcatagagcagttaggaaacactctgtttgtaaagtctgcaagtggatattcagacctccttgaggccttcgttggaaacgggatttcttcatattctgctagacagaagaattcccagtaacttccttgtgttgtgtgtgttcaactcacagagttgaactttcatttacacagagcagatttgaaacactctttctgtggaatttgcaagtggagatttcaagcgctttgaggccaaaggcagaaaaggaaatatcttcgtttcaaaactagacagaatcattctcagaaactgctctgcgatgtgtgcgttcaactctcagagtttaacttttcttttcattcagcagtttggaaacactctgtttgtaaagtctgcacgtggatattttgaccatttagagaccttcgttggaaacgggtttttttcttgtaaggctagacagaagaattcccagtaacttccttgtgttgtgtacattcaactcacagagttgaacgttcccttagacagagcagatttgaaacactctttttgtgcaattggcaaatggagatttccagcgctttaaggtcaatggcagaaaaggaaatatcttcgtttcaaaactagacagaaaatcattcccacaaactgcgttgtgatgtgttcgttcaactcacagagtttaacctttctgttcatagagcagttaggaaacactctgtttgtaaagtctgtaagtggatattctgacatcttgtggccttcgttggaaacgggatttcttcatattctgctagacagaagaattcccagtaacttcccttgtgttgtgtgtgttcaactcacagagttgaactttcatttacacagagcagatttgaaacactctttttgtggaatttgcaaatggagatttcagccgcgttgaggccaatggtagaaaaggaaatatcttcgtttcaaaactagacagaatgattctcagaaactcctttgtgatgtgtgtgttcaactcacagattttaacctttcttttcatagagcagttaggaaacactctgtttgtaaagtctgcaagtggatattcagacctctttgaggccttcgttggaaacgggtttttttcatataaggctagacagaagaattctcagtaacttccttgtgttgtgtgtattcaactcacagaattgaacgatcctttacacagagcagacttgaaacactctttttgtggaatttgcatgtggagatttcagccgctttgaggtcaatggtagaaaaggaaatatcttcctatagaaactagacagaatgattctgagaaactcctttgtgatgtgtgcgttcaactcacagagtttaacctttcttttcacagagcagttaggaaacactctgtttgtaaagtctgcaagtggatattcagacctccttgaggccttcgttggaaacgggatttcttcatattatgctagacagaagaattcccagtaacttctttgtgttgtgtgcattcaactcacagagttgaacgttcccttagacagagcagattggaaacactctatttgtgcaatttgcaagtgtagatttcaagcgctttaaggtcaacggcagaaaaggaaatatcttcgtttcaaaactagacagaatcattcccacaaactgcgttgtgatgtgttcgttcaactcacacagtttaacctttctgttcatagagcagttaggaaacactctgtttgtaaagtctctaagtggatactctgacatcttgtggccttcgttggaaacgggatttcttcatattctgctagacagaagaattctcagaaacttccttgtgttgtgtgttttcaactcacagagttgaatgatcctttacacagagtagacttgaaacactctttttgtggaatttgcaagtggagatttcagccgctttgaagtcaatggtagaaaaggaaatatcttcgtataaaaactagacagaatgattctcagaaactcctttgtgatgtgtgcgttcaactcacagagtttaacctttcttttcttagagcagttaggaaacactctgtttgtaaagtctgcaagtggatattcagacctctttgaggccttcgttggaaacgggtttttttcatataaggctagacagaagaattctcagtaacttccttgtgttatgtgtattcaactgacagagttgaactttcatttagagagagcagatttgaaacactgtttttgtggaatttgcaagtggagatttcaagcgctttggggccaaaggcagaaaaggaaatatcttcgtatgaaaactagacacaatcattctcagaaactgctctgcgatgtgtgcgttcaactctcagagtttaacttttcttttcattcagcagtgtggaaacactctgtttgtaaagtctgcacgtggatattttgaccacttagaggccttcgttggaaacgggtttttttcctgtcaggctagacagaagaattcccagtaacttccttgtgttgtgtgcattcaactcacagagttgaacgttcccttagacagagcagatttgaaacactctatttgtgcaatttgcaagtgtagatttgaagcgctttcaggtcaatggcagaaaaggaaatatcttcgtttcaaaactagacagaatgattcccacaaactgcgttgtgatgtgttcgttcaactcacagagtttaacctttctgttcatagagcagttaggaaacactctgtttgtaaagtctgtaagtggatattctgacatcttgtggccttcgttggaaacgggatttcttcatattctgctagacagaagaattctcagtaacttaccttgtgttgtgtttattcaactcacagagttgaatgatcctttacacagagcagacttgaaacactctttttgtggaatttgcaagtggagatttcagccgctttgaagtcaatggtagaaaagtaaatatcttcgtataaagacaagacagaatgattttcagaaactgctttgtgatgtgtgcgttcaactcacagagtttcaactttcttttcatagagcagttaggaaacactctgtttgtaaagtctacaagtggatattcagacctctttgaggccttcgttggaaacgggatttctttatattatgctagacagaagaattcccagtaacttccttgtgttgtgtgtgttcaactcacagagttgaactttcatttacacagagcagatttgaaacactctttttgtggaatttgcaagtggagatttcaagcgctttgaggccaaaggcagaaaaggaaatatcttcgtataaaaagtagacagaatcattctcagaaactgctctgcgatgtgtgcgttcaactctcagagtttaacttttcttttcattcagcagtttggaaacagtctgtttgtaaagtctgcacgtggatattttgaccacttagaggccttcgttggaaacggttttctttcctgtaaggctatacagaagaattcccagtaacttccttgtgttgtgtgcattcaactcacagagttgaacgttcccttaaacagagcagatttgaaacactctttttgtgcaattggcaagtggagatttcaagcgctttaaggtcaatggcagaaaaggaaatatcttcgtttcaaaactagacagaatcattcccacaaactgcgttgtgatgtgttcgttcaactcacagagtttaacatttcttttcatagagcagttaggaaacagtctgtttgtaaattctgtaagtggatattctgacatcttgtggccttcgttggaaacgggatatcttcacattctgctagacagaagaattctcagtaacttccttgtgttgtgtgtattcaactcagagagttgaacgatcctttacacagagcagacttgtaacactctttttgtggaatttgcaagtggagatttcagccgctttgaagtcaaaggtagaaaaggaaatatcttcctataaaaactagacagaatgattctcagaaactcctttgtgatgtgtgtgttcaactcacagagtttaaccattcttttcatagagcagttagtaaacactcagtttataaagtctgcaaatggatattcagacccctttgaggccttcgttggaaacgggatttcttcatattatgctagaaagaagaattcccagtaacttccttgtgttgtgtgtgttcaactcacagagttgaactttcatttacacagagcagatttgaaacactctttgtggaatttgcaagtggagatttcaagcgctttgaggccaaaggcagaaaaggaaatatcttcgtataaaaactagacagaatgattctcagaaacttcattgtgatgtgtgcgttcaactcacagagtttaacctttcttttcatagagcagttaggaaacactctgtttgtaaactctgcaagtggatattcagacctcctttgaggccttcgttggaaacgggatttcttcatactgtgctagacagaagaattcgcagtaacttccttgtgttgtgtgtattcaactgacagagttgaacttacatttagacagagcagattagaaaaactctttatgtggaattttcaagtggagatttcaagcgcgttgaggccaaaggcagaaaaggaaatatcttcgtataaaaactagacagaatcattccctcaaactgcgttgtgatgtgttcgatcaactcacggagtttaacctttcttttcatacagcagttaggaaacactctgtttgtaaagtctgtaagtggatatgctgacatcttgtggccttcgttggaaacgagatgtcttcatattctgctagacagaagaattctcagaatcttccttgtgttgtgtgtattcaactcacagagttgaacgatccctttacacagagcagacttgaaacactctttttgtggaatttgcaagtggagatttcagccgctttgaggtccatggtagaaaaggaaatatcttcgtataaaaactagacagaatgattctcagaaactcctttgtgatgtgtgcgttcaactcacagagtttaacctttcttttcatagagcagttaggaaacactctgtttgtaaagtctgcaagtggatattcagacatctttgaggccttcgttggaaacgggatttcttcatgttctgctagacacaagaattctcagtatcttccttgtgttgtgtgtgttcaactcacagagttgaactttgatttacacagagcagatttgaaacactctttttgtggaatttgcaagtggagatttcaagcgctttgaggccaaaggcagaaaaggaaatatcttcgtctaaaaactagacagaatcattctcagaaactgctctgcgatgtgtgcgttcaactctcagagtttaacttttcttttcattcagcagtttggaaacactctgtttgtaaagtctgcacgtggataatttgaccacttagaggccttctttggaaaagggtttttttcatataaggctagacagaagaattcccagtaacttccttgtgttgtggacattcaactcacagagttgaacgttcccttagacagaacagatttgaaacactctttttgagcaattggcaagtggtgatttcagccgctttgaggtcaatggtagaaaaggaaatatcttcgtataaaaactagacagaatcattcccacaaactgcgttgtgatgtgttcgttcaactcacagagtttaacctttcttttcatagagtagttaggaaacagtctgtttgaaaattctgtaagtagatattctgacagcttgtggccttcgttggaaacgggatttctttatattctgctagacagaataattctcagtaacttccttgtgttgtgtgtattcaactcacagagttgaaggatcctttacagagagcaggcttgaaacactctttttgtcgaatttgcaagtggagatttcagccgctttgtggtcaatggtagaataggaaatatcttcttatagaaactagacagaatgattctcataaactcctttgtgatgtgtgcgttcaactcacagagtttaacttttcttttcacagagcagttaggaaacactctgtttgtaaagtctgcaagtggatattcagacctctttggggccttcgttggaaacgggatttcttcatattctgctagacagaataattctcagtaacttccttgtgttgtgtgtattcaactcacagagttgaacgatcctttacacagagcggacttgaaacattctttttgtggaatttgcaagtggagatttcagccgctttgaggtcaatggtagaataggaaatatcttcctatagaaactagacagaatcattctcagaaactgctctgcgatgtgtgcgttcaactctcagagtttaacatttcttttcattcagcagtttggaaacactctgtttgtaaagtctgcacgtggatattttgaccacttagaggccttcgttggaaacgggtttttttcctgtaaggctagacagaagcattcccagtaacttccttgtgttgtgtgcattcaactcacagagatgaacgttcccttagacagagcagatttgaaacgctctatttgcgcaatttgcaagtgtagatttcaagcgctttaaggtcaatggcagaaaaggaaatatcttcgtttcaaaactagacagaatgattctcagaaactcctttgtgatgtgtgcgttcaactcacagagtttaacctttcttttcatagagcagttgggaaacactctgtttgtaaagtctgcaagtggatattcagacatccttgaggctttctttggaaaagggatttcttcatattctgctagaaagaagaattctcagtaacttccttgtgttgtgtgtattcaactcacagagttgaacgatcctttacacagagcggacttgaaacacactttttgtggaatttgcaagtggagatttcagccgcgttgaggtcaatggtagaaaaggaaatatcttcgtataagaactagacagaatgattctcagaaactcctttgtgatgtgtgcgttcaactcacagagtttaacctttcttttcatagagcagttaggaaacactctgtttgtaaagtctgcaagtggatattcagacctccttgaggccttcgttggaaacggttttttttcatataaggctagacagaagaattcccagtaacttccttgtgttgtgtgtgttcaactcacagagttgaactttcatttacacagagcagatttgagacactctttttgtggaatttgctaatggagatttcaagcgctttgaggccaaaggctgaaaaggaaatatcttcgtataaaaactagacagaatcattctcagaaactgctgcgtgatgagtgcgttcaactctcagagtttaacttttcttttcattcagcggtttggaaacactctgtttgtaaagtctgcacgtggataatttgaccacttagaggccttcgttggaaacgggattttttcatgtaaggctagacagaagaattcccagtaacttccttgtgttgtgtgcattcaactcacagatttgaacgttcccttagacagagcagatttgaaacactctatttgtgcaattggcaagtgcagatttcaagcgctttaaggtcaatggcagaaaaggaaatatcttcgtttcaaaactagacagaatcattcccacaaactgcgttgtgatgtgttcgctcaactcacagagtttaacctttttcttcatagagcagttaggaaacactctgtttgtaaagtctgtaagtggatattctgtcatcttttggccttcgttggaaacgggatttcttcatattctgctagacagaagaattctcagaatcttccttgtgttgtgtgtattcaactcacagagttgaacgatcctttacacacagcagacttgaaacactctttttgtggaatttgcaagtggagatttcagccgctttgaggtccatggtagaaaaggaaatatcttcgtataaaaactagacagaatgattctcagaaagtcctttgtgatgtgtgttttcaactcacagagtttaacctttcttttcatagagcagttagtaaacactctgtttataaagtctgcaagtggatattcagacccctttgaggccttcgttggaaacgggatttcttcatattatgctagacagaagaattctcagtaacttccttgtgttgtgtgtattcaactgacagagttgaactttcatttagggagagcagatttgaaacactgtttttgtggaatttgcaagtggagatttcaagcgctttggggccaaaggcagaaaaggaaatatcttcgtagaaaaactagacagaatcattctcagaaactgctctgtgatgtgtgcgttcaactctcagagtttaacttttcttttcattcagcagtttggaaacactctgtttgtaaagtctgcacgtggatattttgaccacttagaggccttcgttggaaacgggtttttttcatgtaaggatagacagaagaattcccagtaacttccttgtgttgtgtacattcaactcacagagttgaacgttcccttagacagagcagatttgaaacactctttttgtgcaattggcaactggagatttcaagcgctttaaggtcaatggcagaaaaggaaatatcttcgtttcaaaactagacagaatcattctcagaaactgctctgcgatgtgtgcgttcaactctcagagtttaacttttcttttcattcagcagtttggaaacactctgtttgtaatgtctgcacgtggatattttgaccacttagaggccttcgttggaaacgggtttctttcctgtaaggctagacagaagaattcccagtaacttccttgtgttgtgtgcattcaactcacagagttgaacgttcccttagacagagcagatttgaaacactctatttgtgcaatttgcaagtgtagatttcaagcgctttaaggtcaatggcagaaaaggaaatatcttcgtataaaaactagacaggatgattctcataaactcctttgtgatgtgtgcggtcaactcacagagtttaacctttcttttcatagagcagttaggaaacactctgtttgtaaagtctgcaagaggatattcagacctctttgaggctttctttggaaacgggatttcttcatattctgctagacagaagaattctcagtaacttccttgtgttgtgtgtattcaactgacagagttgaactttcatttagagagagcagatttgaaacactgtttttgtggaatttgcaattggagatttcaagagctttggggccaaatgcagaaaaggaaatatcttcgtataaacactagacagaatcattctcagaaactgctctgcgatgtgtacgttcaactctcagagtttaacttttcttttcattcagcagtttggaaacactctgtttgtaaagtctgcacgtggatattttgaccacttagaggccttcgttggaaacgggtttttttcctgtaaggctagacagaagaattcccactaacttccttgtgttgtgtacattcaactcacagagttgaacgttcccttagacagagcagattggaaacactctttttgtgcaattggcaaatggagatttcaagcgctttaaggtcaatggcagaaaaggaaatatcttcgtttcaaaactagacagaatcattcccagaaactgcgttgtgatgtgttcgttcaactcacagagtttaacctttcttttcatagagcagttaggaaacagtctgtttgtcaattctgtaagtggatattctgacatcttgtggccttccttggaaacgggatttcttcatattctgctagacagaagaattctcagtaacttccttgtgttgtgtgtattcaactcacagagttgaaggatcctttacagagagcaggcttgaaacactctttttgtcgaatttgcaagtggagatttcagccgctttgaggtcaatggtagaataggaaatatcttcttatagaaaatagacagaatgattctcataaactcctttgtgatgtgtgcgttcaactcacagagtttaacctttcttttcatagagcagttaggaaacactctgtttctaaagtctgcaagtggatattcagacctccttgaggccttcgttggaaacgggatttcttcatattctgctagacagaagaattctcagtaacttccttgggttgtgtgtattcaactcacagagttgaacgatcctttacacagagcagacttgtaacactctttttgtggaatttgcaagtggagatttcagccgctttgaagtcaaaggtagaaaaggaaatatcttcctataaaaactagacagaatgattctcagaaactcctttgtgatgtgtgcgttcaactcacagagtttaacctttcttttcatagagcagttaggaaacgctctgtttgtaaagtctgcaagtggatattcagacatctttgaggctttcgttagaaacgggatttcttcatattctgctagacagaagaattctcagtaacttccttgtgttgtgtgtattcaactgacagagttgaactttcatttagagagagcagatttgaaacactgtttttgtggaatttgcaagtggagatttcaagagctttggggccaaaggcagaaaaggaaatatcttcgtataaaaactagacagaatcattctcagaaactactctgcgatgtgtgcgttcaactctcagagtttaacttttcttttcattcagcagtttggaaacactctgtttgtaaagtctgcacgtggataatttgaccacttagaggccttcgttggaaacgggtttttttcatgtaaggctagacagaagaattcccagtaacttccttgtgttgtgtacattcaactcacagagttgaacgttcccttagacagagcagatttgaaacactctttttgtgcaattggcaagtggacatttcaagcgctttgaggtcaatggcagaaaaggaaatatcttcgtttcaaaactagacagaatcattcccacaaactgcgttgtgatgtgttcgttcaactcacagagtttaacctttctgttcatagagcagttaggaaacactctgtttgtaaagtctgtaagtggagattctgacatcttgtggccttcgttggaaacgggatttcttcatattctgctagacagaagaattctcagtaacttccttgtgttgtgtgtattcaactctcagagttgaacgatcctttactgagagcagacttgaaacacactttttgtgcaatttgcaagtggagatttcagccgctttgaggtcaatggtagaataggaaatatcttcctatagaaactagacagaatgattctcagaaactcctttgtgatgtgtgcgttcaactcacagagtttaacctttcttttcatagagcggttaggaaacactctgtttgtaaagtctgcaagtggatattcagacctctttgaggccttcgttggaaacgggatttcttcatattctgctagagagaagaattctcagtaacttccttgtgttgtgtgtattcaactgacagagttgaactttcatttagagagagcagatttgaaacactgtttttgtggaatttgcaagtggagatttcaagcgctttgtgtccaaaggcagaaaacgaaatatcttcgtataaaaactagacagaatcattctcagaaactgctgcgtgatgtgtgcgttcaactctcagagtttaacttttcttttcattcagcggtttggaaacactctgtctgtaaagtctgcacgtggatattttgaccacttagaggccttcgttggaaacgtgttttttgcatgtaaggctagacagaagaattcccagtaacttcattgtgttgtgtgcattcaactcacagagttgaacgttcccttagacagagcagatttgaaacactctatttgtgcaatttgcaagtgtagatttcaagcgctttaaggtcaatggcagaaaaggaaatatcttcgtttcaaaactagacagaatcattcccacaaactgcgttgtgatgtgttcgttcaactcacagagtttaacctttctgttcatagagcagttaggaaacactctgtttgtaaagtctgtaagtggatattctgacatcttgtggccttcgttggaaacgggatttcttcatattatgctacacagaataattctcagtaacttccttgtgttctgtgtattcaactcacagagttgaacgatcctttacagagagcagacttgaaacactctttttgtggaatttgcaagtggagatttcagccgctttgaggtcaatggtagaaaaggaaatatcttcgtataaagactagacagaatgattctcagaatctcctttgtaatgtgtgcgttcaactcacagagtttaacctttcttttcatagagcagttaggaaacactctgtttgtaaagtctgcaagtggatattcagacctctttgaggccttcgttggaaacgggatttcttcatattctgctagacagaagaattcccagtaacttccttgtgttgtgtgtgttctacccccagagttgaactttgatttacacagagcagatttgaaacactctttttgtggaatttgcaagtggagatttcaagcgctttgaggccaaaggcagaaaaggaaatatcttcgtataaaaactagacagaatcattctcagaaactgctctgcgatgtgtgcgttcaactctcagagtttaactttgcttttcattcagcagtttggaaacactctgtttgtaaagtctgctcgtggataatttgaccatttagaggccttcgttggaaacgggtttttttcatgtaaggctagacagaagaattcccagtaacttccttgtgttctgtacattcaactcacagagttgaacgttcccttagacagagcagatttgaaacactctttttgtgcaattggcaaatggagatttcaagcgctttaaggtcaatggcagaaaaggaaatatcttcgtttcaaaactagacagaatcattcccacaaactgcgttgtgatgtgttcgtttaactcacagagtttaacctttcttttcatagagcagttaggaaacactctgttggtaaattctgtaagtggatattctgacatcttgtggccttcgttggaaacgggatttcttcatattctgctagatagaagaattctcagaaacgtccttgtgttgtgtgtattcaactcacagagttgaacgatcctttacacagagcagacttgaaacactctttttgtggaatttgcaagtggagatttcagccgctttgaggtcaatggtagaaaaggaaatatcttcgtatagaaacaagacagaatgattctcagaaactcctttgtgatgtgtgcgttcaactcacagagtttaacctttcttttcatagagcagttaggaaacactctgtttgtaaagtctgcaagtggatattcagacatctttgaggccttcgttggaaacgggatttcttcatattatgctagacagaagaattcccagtaacttccttgtgttgtgtgtgttcaactcatagagttgaactttcatttacacagagcagatttgaaacactctttttgtggaatttgcaaatggagatttcagccgcgttgaggtcaatggtagaaaaggaaatatcttcgtttcaaaactagacagaatcattctcagaaactgctctgcgatgtgtgcgttcaactctcagagtttaacttttcttttcattcagcagtttggaaacactctgtttgtaaagtctgcacgtggataacttgaccacttagaggccttcgttggaaacgggtttttttcatgtaaggctagacagaagaattcccagtaacttccttgtgttgtgtgcgttcaactcacagagttgaacgttcccttagacagagcagatttgaaacactctatttgtgcaatttgcaagtgtagttttcaagctctttaaggtcaacggcagaaaaggaaatatcttcgtttcaaaactagacagaatgattctcagaaactcctttgtgatgtgtgcgttcaactcacagagttttacctttctattcatagagcagttaggaaacactctgtttgtaaagtctgcaagtggatattcagacctccttgaggccttcgttggaaacgggatttcttcatattctgctagacagaagaattctcagtaacttccttgtgttgtgtttattcaactcacagagttgaaggatcctttacacagagcagacttgaaacactctttttgtggaatttgcaagtggagatttcagccgctttgaggtcaatggtagaaaagtaaatatcttcgtataaagactagacagaatgattctcagaaactcctttgtgatgtgtgcgttcaactcacagagtttaacctttcttttcatagagcagttaggaaacactctgtttgtaaagtctgcaagtggatattcacacctccttgaggccttcgttggaaacgggatttcttcatattctgctagacagaagaattctcagtaacttccttgtgttgtgtgtattcaactgacagagttgaactttcatttagagagagcagatttgaaacactgtttttgtggaatttgcaagtggagatttcaagcgctttggggccaaaggcagaaaagggaatatcttcgtataaaaactagacagaatcattctcagaaactgctgcgtgatgtatgcgttcaactctcagagtttaacttttcttttcattgagcggtttggaaacactgtgtttgtaaagtctgcacgtggatattttgaccacttagaggccttcgttggaaacggaattttttttgtaaggctagacagaagaattcccagtaacttccttgtgttgtgtacattcaactcacagagttgaacgttcccttagacagagcagacttgtaacactctttttgtggaatttgcaagtggagatttcagccgctttgaagtgaaaggtagaaaaggaaatatcttcctataaaaactagacagaatcattcccacaaactgcgttgtgatgtgttcgttcaactcacagagtttaacctttctgttcatagagcagttaggaaacactctgtttgtaaagtctgtaagtggatattctgacatcttgtggccttcgttggcaacgggatttcttcatattctgctagacagaagaattctcagtaacttccttgtgttgtgtgtattcaactcacagagttgaacgatcctttacacagagcagacttgtaacactctttttgtggaatttgcaagtggagatttcagccgctttgaggtccatggtagaaaaggaaatatcttcgtataaaaactagacagaatgattctcagaaactcctttgtgatgtgtgcgttcaactcacacagtttaacctttcttttcatagagcagttgggaaacactctgtttgtaaagtctgcaagtggatattcagacctccttgaggccttctttggaaacgggatttcttcatattatgctagacagaagaattctcagtaacttccttgtgttgtgtgtattcaactcacagagttgaacgatcctttacacagagcagacttgaaacactctttttgtggaatttgcaagtggatatttcagccgctttgaagtcaatggtagaataggaaatatcttcctatagaaactagacagaatcattctcagaaactgctctgcgatgtgtgcgttcaactctcagagtttaacttttcttttcattcagcagtttggaaacactctgtttgtaaagtctgcacgtggatattttgaccacttagtggccttcgttggaaacgggtttttttcctgtaaggctagacagaagaattcccagtaacttccttgtgttgtgtgcattcaactcacagagttgaacgttcccttagacagagcagatttgaaacactctatttgtgcaatttgcaagtgtagatttcaagcgctttaaagtcaatggcagaaaaggaaatatctttgtttcaaaactagacagaatcattcccacaaactgcgttgtgatgtgttcgttcaactcacagagtttaacctttcttttcatagagcagttaggaaacagtctgtttgaaaattctgtaaggggatattctgacatcttgtggccttcgttggaaacgggatttcttcatattctgctagacagaagaattctcagtaacttccttgtgttgtgtgtattcaactcacagagttgaacgatcctttacacagagcagacttgaaacactctttttgtggaatttgcaagtggagatttcagccgctttgaggtccatggtagaaaaggaaatatcttcgtataaagactagacagatagattctcagaaactcctttgtgatgtgtgcgttcaactcacagagtttaacctttcttttcatagagcagttaggaaacactctgtttgtaaagtctgcaagtgtatattcagacctctttgaggccttcgttggaaacgggtttctttcatataaggctagacagaaggattcccagtaacttccttgtgttgtgtgtgttcaactcacagagttgaactttcatttacaaagagcagatttgaaacactcttttagtggaatttgcaattggagatttcaagcgctttgaggccaaaggcagaaaaggaaatatcttcgtataaaaactagacagaatcattctcagaaactgctctgcgatgtgtgcgttcaactctcagactttaacttttcttttcattcagcagtttggaaacactctgtttgtaaagtctgcacgtggataatttgaccgcttggaggccttcgttggaaacgggtttttttcctgtaaggctagacagaagaattcccagtaacttccttgtgttgtgtgcattcaactcacagagttgaacgttcccttacacagagcagatttgaaacactctgtgcaatttccaagtgtagatttcaagcgctttaaggtcaacggcagaaaaggaaatatcttcgtttcaaaactagacagaatcattcccacaaactgcgttgtgatgtgttcgctcaactcacagagtttaacctttctgttcatagagcagttaggaaacactctgtttgtaaagtctgtaagtggatattctgacatcttgtggccttcgttggaaacgggatttcttcatattctgctagacagaagaattctcagtaacttccttgtgttgtgtgtattcaactcacagagttgaacgatcctttacacagagcagacttgaaacactctttttgtggaatttgcaagtggagatatcagccgctttgaggtcaatggtagaataggaaatatcttcctatagaaactagacagaatgattctcagaaactcctttgtgatgtgtgcgttcaactcacatagtttaacttttcttttcatagagcagttaggaaacactctgtttgtaaagtctgcaagtggatattcagacctctttgaggccttcgttggaaacgggatttcttcatattatgctagacagaagaattcccagtaacatccttgtgttgtgtgtgttcaactcacagagttgaactttcatttacacagagcagatttgaaacactctttttgtggaatttgcaaatggagatttcaagcgctttgaggccaaaggcagaaaaggaaatatcttcgtaaaaaaactagacagaatcattctcagaaactgctctgcgatgcgtgcgttcaactctcagagtttaacttttcttttcattcagcagtttggaaacactctgtttgtaaagtctgcacgtggataatttgaccacttagaggcctttgttggaaacgggtttttttcctgtaaggctagacagaagaattcccagtaacttccttgtgttgtgtacattcaactcacagagttgaacgttcccttagacagagcagatttgaaacactctttttgtgcaattggcaagtggagatttcaagcgctttatggtcaatggcagaaaaggaaatatcttcgtttcaaaactagagagaatgattctcagaaacttctttgtgatgtgtgcgttcacctcacagagtttaacctttcttttcatagagcagttaggaaacactttgtttgtaaagtctgcaagtggatattcagacctgtttgaggccttcgttggaaacgggatttcttcatactatgctagacagaagaattctcagtaacttccttgtgttgtgtgtattcagctcacagggttgaacgatcctttatacagagcagacttgaaacactctttttgtgggacttgcaagtggagatttcagccgctttgaggtcaataatagaaaaggaaatatcttcgtagaaaaactagacagaatgattctcagaaactcctttgagatgtgtgtgttctactcacagagtttaacctttcttttcatagagcagttaggaatcactctgtttgtaaagtctgcaagtggatattcagacctctttgaggccttcgttggaaacgggtttttttcatataaggctagacagaagaattctcagtaacttccttgtgttgtgtgtattcaagtgacagaggtgaactttcatttagagagagcagatttgaaacactgtttttgtggaatttgcaagtggagatttcaagcgctttggggccaaaggcagaaaaggaaatatcttcgtataaaaactagacagaatcattctcagaaactgctctgtgatgtgtgcgttcaactctcagagtttaacttttcttttcattcagcagtttggaaacactctgtttgtaaagtctgcacgtggatattttgaccacttagaggccttcgttagaaacgggtttttttcatgtaaggctagacagaagaattcccagtaacttccttgtgttgtgtgcattcaactcacagagttgaaccgttcccttagacagagcagatttgaaacactctatttgtgcaatttgcaagtgtagttttcaagctctttaaggtcaacggcagaaaaggaaatatcttcgtttcaaaactagacagaatcattcccacaaactgcgttgtgatgtgttcgttcaactcacagagtttaacctttcttttcatagagcagttaggaaacactctgttggtaaattctgtaagtggatattctgacatcttgtggcctccgttggaaacgggatttcttcatattctgctagacagaagaattctcagaaacttccttgtgttctgtttatttaactcacagagtcgaacgatcctttactcagagcagacttgaaacactccatttgtggaatttgcaagtggagatttcagccgctttgaggtcaatggtagaataggaaatatcttcctatggaaactagacagaatgattctcagaaactcctttgtgctgtgtgcgttcagctcacagagtttaacctttcttttcatagagcagttaggaaacactctgtttgtaaagtctgcaagtggatattcagacatctttgaggctttcgttggaaacgggatttcttcatattctgctagacagaagaattctcagaaacttccttgtgttgtgtgttttcaactcacagagttcaacgatccattacacagagaagacttgaaacactctttttgtggaattggcaagtggagatttcagccgctttgaggtcaatggtagaaaaggaaatatcttcgtataaaaactagacagaatcattctcagaaactgctctgcgatgtgtgcgttcaactctcagagtttaacttttcttttcattcagcagtttggaaacactctgtttgtaaagtctgcacgtagatattttgaccacttagaggccttcgttggaaacgggtttttttcctgtaaggctagacagaagaattcccagtaacttccttgtgttgtgtacattcaactcacagatttgaacgttcccttagacagagcagatttgaaacactctttttgtgcaattggcaagtggagatttcaagagttttaaggtcaatggccgaaaaggaaatatcttcgtttcaaaactagacagaatcattcccacaaactgcgttgtgatgtgttcgttcaaatcacagagtttaacctttcttttcatagagcagttaggaaacactctgtttgtaaattctgtaagtggatattctgacatcttgtggccttctttggaaacgggatttcttcatattctgctagacagaagaattctcagtaacttccttgtgttgtgtgtattcaactcacagagttgaacgatcctttacacagagcagacttgaaacactctttttgtggaatttgcaagtggagatttcagccgctttgaggtcaatggtagaaaaggaaactatcttcatataaagacaagacagaatgattctcagaaactcctttttgctgtgtgcgttcagctcacagagtttaacctttcttttcatagagcagttaggaaacactctgtttgtaaagtctgcaagtggatattcagacatctttgaggcttttgttggaaacgggatttcttcatattctgctagacagaagaattcccagtaacttccttgtgttgtgtgtgttcgactcacagatttgaactttcatttacacagagcagatttgaaacactctttttgtgggatttgcaaatggagatttcaagcgctttgaggccaaaggcagaaaaggaaatatcttcgtataaaaactagacagaatcattctcagaaactgctctgcgatgtgtgcgttcaactctcagagtttaacttttcttttcattcagcagtttggaaacactctgtttgtaaagtctgcacgtggataacttgaccacttagaggccttcgttggaaacgggtttttttcatgtaaggctagacagaagaattcccagtaacttccttgtgttgtgtacattcaactcacagagttgaacgttcccttagacagagcagatttgaaacactctttttgtgcaattgggaagtggagatttcaagcgctttaaggtcaatggcagtaaaggaaatatcttcgtttcaaaactagacagaatcattcccacaaactgcgttgtgatgtgttcgttcaactcacagatgtttaacctttcttttcatagagcagttaggaaacagtctgtttgtaaattctgtaagtggatattctgacatcttgtggccttcgttggaaacgggatttcttcatattctgctagacagaagaattctcagtaacttccttgtgttgtgtgtattcaactcacagagttgaacgatcgtttacacagagcagacttgaaacactctttttgtggaatttgcaagtggagatttcagccgctttgaggtcaatggtagaaaaggaaatatcttcgtataaagactagacagaatgattctcagaaactcctttgtgatgtgtgaattcaactcacagagtttaacctttcttttcacagagcagttaggaaacactctgtttgtaaaatctgcaagtggatattcagacctccttgaggccttcgttggaaacgggatttcttcatattatgctagacagaagaattcccagtaacttccttgtgttgtgtgtgttcaactcacggagttgaactttcatttacacagagcagatttgaaacactctttttgtggaatttgcaagtggagatttcaagcgctttgaggccaaaggcagaaaaggaaatatcttcgtttgaaaactacacagaaatcattctcagaaactgctgcgtgatgtgtgcgttcaacactcagagtttaacttttcttttcattcagcggtttggaaacactctgtttgtaaagtctgcacgtggataatttgaccacttagaggccttcgttggaaacgggattttttcatgtaaggctagacagaagaattcccagtaacttccttgtgttgtgtgcattcaactcaaagagttgaacgttcccttagacagagcagatttgaaacactctatttgtgcaatttgcaagtgtagatttcaagcgctttaaggtcaatggcagaaaaggaaatatcttcgtttcaaaactagacagaatcattcccacaaactgcgttgtgatgtgttcgttcaactcacagagtttaacctttctgttcatagagcagttaggaaacactctgtttgtaaagtctgtaagtggatattctgacatcttgtggccttcgttggaaatgggatttcatcatattctgctagacagaagaattctcagtaacttccttgtgttgtgtttattcaactcacagagttgaatgatcctttacacagagcagactttaaacactctttttgtggaatttgcaagtggagatttcagccgctttgaggtcaatggtagaaaaggaaatatcttcgtataaagactagacagaatgattgtcagaaactcctttgtgatgtgtgcgttcaactcacagagtttaacctttcttttcatagagcagttaggaaacactgtgttgttaaagtctgcaagtggatattcagacctccttgaggccttcgttggaaatgggatttcttcatattctgctagacagaagaattctcagtaacttccttgtgttgtgtgtattcaactcacagagttgaactttcatttagagagagcagatttgaaacactgtttttgtggaatttgcaagaggacatttcacgcgctttggggccaagggcagaaaaggaaatatcttcgtataaaaactagacagaatcattttcagaaactgctgcgtgatgtgtgcgttcaactctcagagtttaacttttcttttcattcagcggtttggaaacagtctgtttgtaaagtctgcacgtggatattttgaccacttagaggccttcgttggaaacgggttttttgcatgaaaggttagacagaagaattctcagtaacttccttgtgttgtgtgtattcaactcacagagttgaacgatactttacacagagcagatttgaaacactctatttgtgcaatttgcaagtgtagttttcaagctctttaaggtcaacggcagaaaaggaaatatcttggtttcaaaactagacagaatcattcccacaaactgcgttgtgatgtgttcgttcaaatcacagagtttaacttttcttttcatagagctgttaggaaacagtctgtttgtaaattctgtaagtggatattctgacatcttgtggccttcgttggaaacgggatttcttcatattctgctagacagaataattctcagtaacttccttatgttgtgtgtattcaactcacagagttgaacgatcctttacacagagcagacttgaaacactctttttgtggaatttgcaagtggagatttcagccgctttgaggtcaatggtagaataggaaatatcttcctatagaaactagacagaatgattctcacaaactcctttgtgatgtgtgcgttcaactcacagagttaaacctttcttttcatagagcagttaggaaacactctgtttgtaaagtctgcaagtggatattcagacctccttgaggccttcgttggaaaggggatttcttcatattatgctagacagaataattctcagtaacttccttgtgttgtgtgtattcaactgacagagttgaactatcatttagagagtgcagatttgaaacactgtttttgtggaatttgtaagtggagatttcaagcgctttggggccaaaggcagaaaaggaaatatcttcgtataaaaactagacagaatcattctcagaaactgctgcgtgatgtgtgcgttcaactctcagagtttaacttttcttttcattcagcggtttggaaacactctgtttgtaaagtctgcacgtggatatattgaccacttagaggccttcgttggaaacgggttttttgcatgtaaggctagacagaagaattcccagtaatttccttgtgttgtgtgcattcaactcacagagttgaacgttcccttagacagagcagatttgaaacactctatttgtgcaatttggaagtgtagatttcaagcgctttaaggtcaatggcagaaaaggaaatatcttcgtttcaaaactagacagaatcattcccacaaactgcgttgtgatgtgttcgttcaacccacagagtttaacctttctgttcatagagcagttaggaaacactctgtttgtaaagtatgaaagtggatattctgacatccttgtggccttcgttggaaacgggatttcttcatattctgctagacagaagaattctcagtaacttccttgtgttgtgtgtattcaactgacagagttgaactttcatttacacagagcggacttgaaacactctttttgtggaatttgcaattggagatttcagccgcgttgaggtcaatggtagaaaaggaaatctcttcgtataaaaactagacagaatgattcacagaaaatcttttgtgatgtgtgcgttcaactcacagagtttaacttttcttctcatggagcagttaggaaacactctgtttgtaaagtctgcaagtggatattcagacccctttgaggccttcgttggaaacgggatttcttcatattctgctagacagaagaattctcagtaacttccttgtgttgtgtgtattcaactgacagagttgaactttcatttagacagagcagatttgaaacactctttttgtggaatttgcaaaggtagatttcatgcgctttgaggccaaaggcagaaaaggaaatatcttcgtataaaaactagacagaatcatgctcagaaactgctctgcgatgtgtgcgttcaactctcagagtttaacttttcttttcattcagcagtttggaaacactctgtttgtcaagtctgcacgtgcataatttgaccgcttagaggccttcgttggaaacgggtttttttcatgtaaggctagacagaagaattcccagtaacttccttgtgttgtgtgcattcaactcacagagttgaacgttcccttagacagagcagatttgaaacagcctatttgtgcaatttgcaagtgtagatttcaagcgctttaaggtcaacggcagaaaaggaaatatcttcctttcaaaactagacagaatgattctcagaaactcctttgtgatgtgtgcgttcaactcacagagtttaacttttcttttcatagagcagttaggaaacactctgtttgtaaagtctgcaagtggatattgagacctctttgaggccttcgttggaaacgggatttcttcatattatgctagacagaataattctcagtaactttccttgtgttgtgtgtattcaactcacagagttgaacgatcctttacagagagcagacttgaaacactctttttgtggaattcgcaagtggagatttcagccgctttgaggtcaatggtagaaaaggaaatgtcttcgtataaagactagacagaatgattcccataaactcctttgtgatgtgtgcgttcaactcacagagtctaacctttctgttcatagagcagttaggaaacactctgtttgtaaagtctgcaagtggatattcagacctccttgaggccttcgttggaaacgggatttcttcatattctgctagacagaagaattcccagtaacttccttgtgttgtgtgtgttcaactcacagaattgaactttcatttacacagagcagatttgaaacactctttttgtggaatttgcaaatggagatttcaagcgctttgaggccaaaggcagaaaaggaaatatcttcgtttcaaaactagacagaatcattctcagaaactgctgcgtgatgtgtgcgttcaactctcagagtttaacttttcttttcattcagcggtttggaaacactctgtttgtgaagtctgcccgtggatattttgaccccttagaggccttcgttggaaacgggtttttttcatgtaaggctagacagaagaattcccagtaacttccttgtgttgtgtgcattcaactcacagagatgaaagatcccttagacagagcagatttgaaacactctatttgtgccatttgcaagtgtagatttcaagcgctttaaggtcaatggcagaaaaggaaatatcttcgtttcaaaactagacagaatcattcccacaaactgcgttgtgatgtgttcgttcaactcacagagtttaacctttctgttcatagagcagttaggaaacactctgtttgtaaagtctgtaagtggatattctgacatcttgtggccttcgttggaaacgggatttcttcatattgtgctagacagaagaattctcagtaacttccttgtgttgtgtgtattcaactcacagagttgaacgatcctttacacagagtagacttgaaacactctttttgtggaatttgcaagtggagatttcagccgctttgaggtcaatggtagaataggaaatatcttcctatagaaactagacagaatgattctcagaaactcctttgtgatgtgtgcgttcaactcacagagtttaacttttcttttcatagagccgttaggaaacactctgtttgtaaagtctgcaagtggatattcagacctctttgaggccttcgttggaaacgggatttcttcatattatgcgtagacagaagaattctcagtaacttccttgtgttgtgtgtattcagctgacagagttgaactttcatttagagagagcagatttgaaacactgtttttgtgtaatttgcaattggagatttcaagcgctttggggccaaacgcagaaaaggaaatatcttcgtataaaaactagacagaatcattctcagaaactgctgtgcgatgtatgcgttcaactctcagagtttaacttttcttttcattcagcagtttggaaacactctgtttgtaaagtctgcacgtggatattttgaccacttagaggccttcgttggaaacgggtttttttcatgtaaggctagacagaagaattcccagtaacttccttgtgttgtgtacattcaactcacagagttgaacgttcccttagacagagcagatttgaaacactctttttgtgaaattggcaagtggagatttcaagcgctttaaggtcaatggcagaaaaggaaataccttcgtttcaaaactagacagaatgattctcagaaactcgtttgtgatgtgtgcgttcaactcacagagtttaacctttcttttcatagagcagttaggaaacactctctaaagtctgcaagtggatattcagacctccttgaggtcttcgttggaaacgggatttcttcatattctgctagacagaagaattctcagtaacttccttgtgttgtgtttattcaactcacagagttgaatgatcctttacacagagcagacttgaaacactctttttgtggaatttgcaagtggagatttcagccgatttgaggtcaatggtataaaagtaaatatcttcgtataaagactagacagaatgattctcagaaactcctttgtgatgtgtgcgttcaactcacagagtttaacctttcttttcatcgagcagttaggaaacactctgtttgtaaagtctgcaagtggatattcagacctctttgaggccatcgttggaaacgggatttcttcatattctgctagagagaggaattctcagtaacttccttgtgttgtgtgtattcaactgacagagttgaactttcttttagagagagcagatttgaaacactgtttttgtggaatttgcaactggagatttcaagcgctttggggccaaaggcagaaaaggaaatatcttcgtataaaaactagacagaatcattctcagaaactgctctgcgatgtgtgcgttcaactctcagagtttaacttttcttttcattcagcagtttggaaacactctgtttgtaaggtctgcaagtggatattcagacctctttgtggccttctttggaaacgggtttttttcatataaggctagacagaagaattcccagtaacttccttgtgttgtgtgcattcaactcacagagttgaacgttcccttagacagagcagatttgaaacactctatttgcgcaatttgcaagtgtagatttcaagcgctttaaggtcaatggcagaaaaggaaatatcttcgtttcaaaactagacagaatcattcccacaaactgcgttgtgatgtgttcgttcaactcacagagtttaacctttcttttcatagagcagttaggaaacactctgtttataaactctgcaagtggatattcagacctctttgaggcctttgttggaaacgggatttcttcatactatgctagacagaagaattctcagaaacctccttgtgttgtgtgtattcaactcacagagttcaatgacgctttacacagagcagacttgaaacactctttttgtggaatttgcaagtggagatttcagccgctttgaggtcaatggtagaataggaaatatcttcctatagaaactagacagaatgattctcagaaactcctttgtgatgtgtgcgttcaactcacagagtttaacctttcttttcatagagctgttaggaaacactctgtttgtaatgtctgcaagtggatattcagacatccttgaggctttcgttggaaacgggatttcttcatattctgctagaaagaagaattctcaggaacttccttgtgttgtgtgtattcaactcagagagttcaacgatcctttacacagagcagacttgaaacactctttttgtggaatttgcaagtggagatttcagccgctttgaggtcaattgtagaaaaggaaatatcttcgtataaaaactagacagaatgattctcagaaactcctttgtgatgtgtgcgttcaactcacagagtttaccctttcttttcatagagcagttaggaaacactctgtttgtaaagtctgcaagtggatattcagacctccttgatgccttcgttggaaacgggatttcttcatattattgtagacagaagaattctcaataacttccttgtgttgtgtgtattcaactcacagagttgaacgatcctttacacagagcagacttgaaacactctttttgtggaatttgcaagtggagatttcagccgctttgaggtcaatggtagaataggaaatatcttcctatagaaactagacagaatcattctcagaaactgctgcgtgatgtgtgcgttcaactctcagagtttaacttttcttttcattcagcggtttggaaacactctgtttgtaaagtctgcacgtggatattttgaccacttagaggccttcgttggaaacgggattttttcatgtaaggctagacagaagaattcccagtaacttccttgtgttgtgtgcattcaactcacagagttgaacgttcccttagacagagcagatttgaaacactctatttgtgcaatttgcaagtgtagatttcaagcgctttaaggtcaacggcagaaaaggaaatatcttcgtttcaaaactatacagaatcattcccacaaactgcgttgtgatgtgttcgttcaactcacagagtttaacctttcagttcatagagcagttaggaaacactctgtttgtaaagtctgtaagtggatattctgacatcttgtggccttcgttggaaacgggatttcttcatattctgcaagacagaagaattctcagtaacttccttgtgttgtgtgtattcaactcacagagttgaacgatcctttacacagagcagacttgaaacactctttttgtggaatttgcaattggagatttcagccgctttgaggtcaatagtagaaaaggaaatatcttcgtagaaaaactagacagaatgattctcagaaactcctttgtgatgtgtgtgttcacctcacagagtttaacctttcttttcatagagcagttagtaaacactctgtttataaagtctgcaactggatattcagacccctttgaggccttcattggaaacgggatttcttcatattatgctagacagaagaattctcagtaatttccttgtgttgtgtgtattcaactcacagagttgaacgatcctttacacagagcagacttgaaacactctttttgtggaatttgcaagtggagatttcagccgcattgggttcaatggtagaataggaaatatcttcctatagaaactagacagaatgattctcagaaactcctttgtgatgtgtgcgttcaactcacagagtttaacctttcttttcatagagcagttaggaaacactctgtttgtaaagtcagcaagtggatattcagacctctttgaggccttcgttggaaacgggatttcttcatattctgctagacagaagaattcccagtaacttccttgtgttgtgtgtgttcaactcacagagttgaactttcatttacacagagcagattggaaacactctttttgtggaatttgcaagtggagatttcaagcgctttgaggccaaaggcagaaaaggaaatatcttcgtataaaaactagacagaatcattctcagaaactgctgtgcgatgtgtgcgtttaactctcagagtttaacttttcttttcattcagcagtttggaaactctctctttgtaaagtctgcacgtggataacttgaccacttagaggccttcgttggaaacgggtttttttcatgtaaggctagacagaagaattcccagtaacttccttgtgttgtggacattcaactcacagagttgaacgttcccttagacagaacagatttgaaacactctttttgtgcaattggcaagtggttatttcagccgctttggggtcaatggtagaaaaggaaatatcttcgtataaaaactagacagaatcattaccacaaactgcgttgtgatgtgttcgttcaactcacagagtttaacctttctcttcatagagcagttaggaaacactctgtttgtgaagtctgtaagtggatattctgacatcttgtggccttcgttggaaacgggatttcttcatattctgctacacagaagaattcccagtaacttccttgtgttgtgtgtattcaactcacagagttgaacgatcctttacacagagcagacttgaaacactctttttgtggaatttgcaagtggagatttcagccgctttgaggtcaatggtagaataggaaatatcttcctatagaaactagacagaatgattctcagaaactcctttgtgatgtgtgcgttcaactcacagagtttaacctttcttttcatagagcagttgggaaacactctgtttgtaaagtctgcaagtggatattcagacctccttgaggctttcgttggaaacgggatttcttcatattctgctagaaagaagaattcccagtaacttcccttgtgttgtgtgtgttcaactcacagagttgaactttcatttagtcagagcagatttgaaacactctttttgtggaatttgcaaatggagatttcaagcgctttgaggccaaaggcagaaaaggaaatatcttcgtataaaaactagacagaatcattctcagaaactgctctgcgatgtgtgcgttcaactctcagagtttaactttgcttttcattcagcagtttggaaacactctgtttgtaaagtctgcacgtggatattttgaccgcttagaggccttcgttggaaacgggtttctttcctgtaaggctagacagaagaattcccagtaacttccttgtgttgtgtacattcaactcacagagttgaacgttcccttagacagagcagatttgaaacactctttttgtgcaattagcaagtggagatttcaagcgctttaaggtcaatggcagaaaaggaaatatcttactttcaaaactagacagaatcattcccacaaactgcgttgtgatgtgttcgttcaactcacagagtttaacctttcttttcatagagcagttaggaaacactctgttggtaaattctgtaagtggatattctgacatcttgtggccttcgttgtaaacgggatttctacatattctgccagacagaagaattctcagaaacttccttgtgttgtgtgttttcaactcacagagttgaacgatcctttacacagagcagacttgaaacactccttttgtggaatttgcaagtggagattttagccgctttgaggtcaatggtagaataggaaatatcttcctatagaaagtagacagaatgattctcagaaactcctttagtgatgtgtgcattcaactcacagagtttaacctttcttttcatagagcagttaggaaacactctgtttgtaaagtctgcaagtggatattcagacctccttgaggccttcgttggaaacgggacttcttcatattatgctacacagaggaattcccagtaacttccttgtgttgtgtgtgttcaactcacagagttgaactttcatttacacagagcagatttgaaacactctttttgtggaatttgcaaatgaagatttcaagcgctttgaggccaaaggcagaaaaggaaatatcttcgtttcaaaactagacagaatcattctcagaaactgctctgcgatgtgtgcgttcaactctcagagtttaacttttcttttcattcagcagtttggaaacactctggttgtaaagtctgcacgtggataacttgaccacttagaggacttcgttggaaacgggtttttttcctgtaaggctagacagaagaattcccagtaacttccttgtgttgtgtgcattcaactcacagagttgaacgttcccttagacagagcagatttgaaacactctatttgtgcaatttgcaagtgtagttttcaagctctttaaggtcaacggcagaaaaggaaatatcttggtttcaaaactagacagaatgattctcagacacttctttgtgatgtgtgcgttcaactcacagagtttaacctttcttttcatagagcagttaggaaacagtctgtttgtcaattctgtaagtggatattctgacatcttgtggccttcgttggaaacgggatttcttcatattctgctagacagaagaattctcagtaactttcttgtgttgtgtgtattcaactcacagagttgaacgatcctttacacagagcagacttgaaacactctatttgtagaatttgcaagtggagatttcagccgctttgaggtcagtagtagaaaaggaaatatcttcgtggaaaaactagacagaatgattctcagaaactcttttgtgatgtgtgcgttcaactcacagagtttaacctttcttttcatagagcagttaggaaacactctgtttgtaaagtctgcaagtggatattcagacctctttgaggccttcgttggaaacgggatttcttcatattctgctagagagaagaattcccagtaacttccttgtgttgtgtgtgttcaactcacagagttgaactttcatttacacagagcagatttgaaacactctttttgtggaatttgcaagtggagatttcaagcgctttgaggccaaagttagaaaaggaaatatcttcgtataaaaactagacagaatcattctcagaaactgctttgcaatgtgtgcgttcaactctcagagtttaacttttcttttcattcagcagtttggaaacactctgtttgtaaagtctgcacgtggatattttgaccacttagaggccttctttggaaacgggtttttttcctgtaaggctagacagaagaattcccagtaacttccttgtgttgtgtacattcaactcacagagttgaacgttcccttagacagagcagatttgaaacactctttttgtgcaattggcaagtggggatttcaagcgcgttgaggtcaatggccgaaaaggaaatatcttcgtttcaaaactagacagaaaatgattctcagaaactcctttgtgatgtgtgcgttcaactcacagagtttaaccgttcttttcatagagtagttaggaaacactctgtttgtaaagtctgcaagtggatattcagacctctttgaggccttcgttggaaacgggatttcttcatattctgctagacagaagaactctcagtaacttccttgtgttgtgtgtattcaactcacagggttgaacgatcctttacacagagcatacttgaaacactcttcttgtggaatttgcaagtggagatttcagccgctttgaggtcaatggtagaataggaaatatcttcctatagaaactagacagaatgattctcagaaactcctttgtgatgtgtgcgttcaactcacagagtttaacctttctgttcatagagcagttaggaaacactgtgtttgtaaagtctgcaagtggatattcagacctccttgaggccttcgttggaaacgggatttcttcatattctgctagacagaagaattcccggtaacttccttgtgttgtgtgtgttcaactcacagagttgaactttcatttacacagagcagatttgcaacactcttttgtggaatttgcaagtggagatttcaagcgctttgaggccaaaggcagaaaaggaaatatcttcgtttcaaaactagacagaatcattctcagaaactgctctgcgatgtgtgcgttcaactctcagagtttaacttttcttttcatttagcagtttggaaacactctgtttgtaaagtctgcacgtggataatttgaccacttagaggccttcgttggaaacgggtttttttcatgtaaggctagacagaagaattcccagtaacttccttgtgttgtgtgcattcaactcacagagttgaacgtacccttagacagagcagatttgaaacactctatttgtgcaatttgcaagtgtagttttcaagctcttttaggtcaacggcagaaaaggaaatatcttggtttcaaaactagacagaatcattcccacaaactgcgttgtgatgtgttcgttcaactcacagagtttaacctttctgttcatagagcagttaggaaacactctgtttgtaaagtctgtaagtggatattctgacatcttgtggccttcgttgggaacgggatttcttcatattctgctagacagaagaattctcagaatcttccttgtgttgtgtgtattcaactcacagagttgaacgatcctttacacagagcagacttgatacagtctttttgtggaatttgcaagtggagatttcagccgctttgaggtccatggtagaaaaggaaatatcttcgtataaaaactagacagaatgattctcagaaactcctttgtgatgtgtgcgttcaactcacagagtttaacctttcttttcatagagcagttaggaaacactctgtttgtaaagtctgcaagtggatattcagacatccttgaggctttcgttgggaacgggttttcttcatattctgctagaaagaagaattctcagtaacttccttgtgttgtgtgtattcaactcacagagttgaactttcatttacacagagcagatttgaaacactctttttgtggaatttgcaaatggagatttcaagggctttgaggccaaaggcagaaaaggaaatatcttcgtttcaaaactagacagaatcattctcagaaactgctctgtgatgtgtgcgttcaactctcagagcttaacttttctgttcattcagcagtttggaaacactctgtttgtaaagtctgcacgtggataatttgaccacttagaggccttcgttggaaacgggtttttttcatgtaaggctagacagaagaattcccagtaacttccttgtgttgtgtgcattcaactcacagagttgaacgttcccttagacagagcagatttgaaacactctatttgtgcaatttgcaagtgtagatttcaagcgctttaaagtcaatggcagaaaaggaaatatcttcgtttcaaaactagacagaatgattctcataaactcctttgtgatgtgtgcgttcaaatcacagagtttaacttttcttttcatagagcagttaggaaacactctgtttgtaaagtctgcaagtggatattcagacctctttgaggccttctttggaaacgggatttcttcatattatgctagacagaataattctcagtaacttccttgtgttgtgtgtattcaactcacagagttgaacgatcctttacacagagcagacttgaaacactctttttgtgcaatttgcaagtggagatttcagccgatttgaggtcaatggtagaataggaaatatcttcctatagaaactagacagaatgattctcagaaactcctttgtgatgtgtgcgttcaactcacagaatttaacatttcttttcatagagcagttaggaaacactctgtttgtaaagtctgcaagtggatattcagacctctttgaggccttcgttggaaacgggatttcttcatattctgctagacagaagaattcccagtaacttccttgtgttgtgtgtgttcaactcacagagttgaactttgatgtacacagagcagatttgaaacactctttttgtggaatttgcaagtggagatttcaagcgctttgaggccaaaggcagaaaaggaaatatcttcgtataaaaactagacagaatcattctcagaaactgctctgcgatgtgtgcgttcaactctcagagtttaacttttcttttcattcagcagtttggaaacactctgtttgtatagtctgcacgtggatattttgaccacttagaggccttcgttggaaacgggtttttttcctgtaaggctagacagaagaattcccagaaacttccttgtgttgtgtgcattcaactcacagagttgaacgttcccttagacagagcagatttgaaacactctatttgtgcaatttgcaagtgtagatttcaagcgctttaaggtcaatggcagaaaaggaaatatcttcgtttcaaaactagacagaatcattcccacaaactgcgttgtgaagtgttcgttcaactcacagagtttaacctttctgttcatagagcagttaggaaacactctgtttgtaaagtctgtaagtggatattctgacatcttgtggccttcgttggaaacgggatttctgcatattctgctagacagaagaattctcagaaacttccttgtgttgtgtgttttcaactcacagagttgaacgatcctttacgcagagcagacttgaaacactctttttgtggaatttgcaagtggagatttcagccgctttgaggtcaatggtataaaaggaaatatcttcgtataaaaactagacagaatgattcacagaaactcctttgtgatgtgtgcgttcaactcacagagtttaaccattcttttcatagagcagttaggaaacactctgtttgtaaagtctgcaagtggatattcagacctctttgaggccttcgttggaaacgggatttcttcatattctgctagacagaagaattcccagtaacttccttgtgttgtgtgtgttcaactcacagagttgaactctcatttacacagagcagatttgaaacactctttttgtggaatttgcaagtggagatttcaagcgctttgaagccaaaggcagaaaaggaaatatcttcgtataaaaactagacagaatcattctcagaaactgctctgcgatgtgtgcattcaactctcagagtttaacttatcttttcattcagcagtttggaaacactctgtttgtaaagtctgcacgtggataatttgaccacttagaggtcttcgttggaaacgggtttttatcatgtaaggctagacagaagaattcccagtaactaccttgtgttgtgtgcattcaactcacagagttgaacgttcccttagacagagcagatttgaaacactctatttgtgcaatttgcaagtgtagttttcaagctctttaaggtcaacggcagaaaaggaaatatcttggtttcaaaactagacagaatcattcccacaaactgcgttgtgatgtgttcgttcaactcacagagtttaacctttcttttcattgagcagttaggaaacagtctgtttgtaaattctgtaagtggatattctgacatcttgtggccttcgttggaaacgggatttcttcatattctgctagacagaagaattctcagtaacttccttgtgttgtgtgtattcaactcacagagttgaacgatcctttacacagagcagacttgaaacactctttttgtggaatttgcaagtggagatttcagccgctttgaagtcaaaggtagaaaaggaaatatcttcgtataaaaactagacagaatgattctcagtaagttctttgtgatgtgtgcgttaaactcacagggattaacctttcttttcatagagcagttaggaaacactctgtttgtaaagtctgcaagtggatattcagacctccttgaggccctcgttggaaacgggatttattcaaattatgctagacagaagaattctcagtaacttccttgtgttgtgtgtattcaactcacagagttgaacgatcctttacacagagcagattagaaacactctttttctcgaatttgcaggtagagatttcagccgctttgcggtcaatagtagaaaagggaatatcttcgtataaaaactagacagaatgattctcagaaactcctttgtgatgtgtgcgttcaactcacagagttcaacctttcttttcatagagcagttaggaaacactctgtttgtaaagtctgcaagtggatattcagacctctttgaggccttcgttggaaacgggttttcttcatattatgctagacagaagaattctcagtagcttccttgtgttgtgtgtattcaactcacagagttgaacgatcctttacacagagcagacttgaaacactctttttgtggaatttgcaattggagatttcagccgctttgaggtcaatggtagaataggaaatatcttcgtataaaaactagacagaatgattctgagaaactcctttgtgatgtgtgcgttcaactcacagagtttaacctttcttttcatagagcagttaggaaacactctgtttgttaagtctgcaagtggatattcagacctctttgaggccttcgttggaaacgggatttcttcatattctgctagactgaagaattctcagtaacttccttgtgttgtgtgtattcaactcacagagttgaacgatcctttacacagagcagacttgaaacactctttttctggaatttgcaagtggagatttcagccgctttgaggtcaatggtagaataggaaatatcttcctatagaaactagacagaatgattctcagaaactcctttgagatgtgtgtgttcaactcacagagtttaacctttcttttcatagagcaattaggaatcactctgtttgtaaagtctgcaagtggatattcagacctctttgaggccttcgttggaaacgggtttttttcatataaggctagagagaagaattctcagtaacttccttgtgttgtgtgtattcaactgacatagttgaactttcatttagagagagcagatttgaaacactgtttttgtggaatttgcaagtggagatttcaagcgctttggggccaaaggcagaaaacgaaatatcttcgtataaaaactagacagaatcattctaagaaactgctctgcgatgtgtgcgttcaactctcagagtttaacttttcttttcattcagcagtttggaaacactctgtttgtaaagtctgcacgtggatattttgaccacttagaggccttcgttggaaacgggtttttttcctgtaaggctagacagaagaattcccagtaacttccttgtgttgtgtacattcaactcacagagttgaacgttcccttagacagagcagatttgaaacactctttttgtgcacttggcaagtggagatttcaagcgctttaaggtcaatggcagaaaaggaaatatcttcgtttcaaaactagacagaatgattctcagaaactcctttgtgatgtgtgtgttcaactcacagagtttaacctttcttttcatagagcagttaggaaacaatctgtttgtaaagtctgcaagtggatattcagacctctttgaggccttcgttggaaacgggtttttttcatataaggctagacagaagaattcccagtaacttccttgtgttgtgtgtgttcgactcacagagttgaactttcatttacacagagcagatttgaaacactctttttgtggaatttgcaagtggagatttcagccgctttgaagtcaaaggtagaaaaggaaatatcttcctataaaaactagacagaatgattctcataaactcctttgtgatgtgtgcgttcaagtcacaaagtttaacttttcttttcatagagcagttaggaaacactctgtttttaaagtctgcaagtggataatcagacctctttgaggccttcgttggaaacgggatttcttcatattatgctagacagaagaattctcagtaacttccttgtgttgtgtgtattcaactcacagagttgaacgatcgtttacacagagcagacttgaaacattctttttgtggaatttgcaagtggagatttcagccgctttgaggtcaatggtagaataggaaatatcttcttatagaaactagacagaatcattctcagaaactgctctgcgatgtgtgcgttcaactctcagagtttaacttttcttttcatttagcagtttggaaacactctgtttgtaaagtctgcacgtggatattttgaccacttagaggcctacgttggaaacgggtttttttcctgtaaggctagacagaagaattcccagtaacttccttgtgttgtgtgcattcaactcacagagttgaacgttcccttagacagagcagatttgaaacactctatttgtgcaatttgcaagtgtagatttcaagcgctttaaggtcaacggcagaaaaggaaatatcttcgtttcaaaactaggcagaatgattctcataaactcctttatgatgtgtgcattcaactcacagagtttcacctttcttttcatagagcagttaggaaacactctgtttgtaaagtctgcaagtagatattcagacctccttgaggccttcgttggaaacgggatttcttcatattctgctagacagaagaattctcagtaacttccttgtgttgtgtgtattcaactcatagagttgaacgatcctttacacagagcagacttgtaacactctttttgtggaatttgcaagtggagatttcagccgctttgaagtcaaaggtagaaaaggaaatatcttcctataaaaactagacagaatgattctcagaatctcctttgtgatgtgtgcgttcaactcacagagtttaacctttcttttcatagagcagttaggaaacactctgtttgtaaagtctgcaagtggatattcagacctctttgaggtcttcgttggaaacgggtttttttcatataaggctagacagaggaattcccagtaacttccttgtgttgtgtgtgttcaactcacagagttgaactttcatttacacagagcagatttgaaacactctttttgtggaatttgcaagtggagatttcaagcgctttgaggccaaaggcagaaaaggaaatatcttcgtataaaaactagacagaatcattctcagaaactgctctgcgatgtgtgcgttgaactctcagagtttaacttttcttttcattcagcagtttgaaaacactctgtttgtaaagtctgcacgtggataacttgaccacgtagaggccttcgttggaaacgggtttttttcatgtaaggctagacagaagaattcccagtaacttccttgtgttgtgtgcattcaattcacagaattgaacgttcccttagacagagcagatttgaaacactctatttgtgcaatttgcaagtgtagatttcaagcgctttaaggtcaatggcagaaaaggaaatatcttcgtttcaaaactagacagaatcattcccacaaactgcgttgtgatgtgttcgttcaactcacagagtttaacctttctgttcatagagcagttaggaaacactctgtttgttaagtctgtaagtggatattcttacatcttgtggccttcgttggaaacgggatttcttcatattctgctagacagaagaattctcagtaacttccttgtgttgtgtgtattcaactcacagagttgaaagatcctttacagagagcagacttgaaacactctttttgtggaatttgtaagtggagatttcagccgctttgaggtcaatggtagaataggaaatatcttaatatagaaactagacagaatgattctcagaaactactttgcgatgtgtgcgttcaactcacagagtttaacctttcttttcatagagcagttaggaaacactctgtttgtaaagtctgcaagtggatattcagacctccttgaggccttcgttggaaacgggatttcttcatattatgctagacagaagatttcccagtaacttccatgtgttgtgtgtgttcaactcacagagttgaactttcatttacacagagcagatttgacacactctttttgtggaatttgcaaatggagatttcaagcgctttgaggccaaaggcagaaaaggaaatatcttcgtataaaaactagacagaatcattctcagaaactgctctgcgatgtgtgcgttcaactctcagagtttaacttttcttttcattcagcagtttggaaacactctgtttgtaaagtctgcacgtggatattttgaccacttagaggccttcgttggaaacgggcttttttcctgtaaggctagacagaagaattcccaggaacttccttgtgttgtgtacattcaactcacagagttgaacgttcccttagacagagcagatttgaaacactctttttgtgcaattggcaagtggtgatttcagcagctttgaggtcaatggtagaaaaggaaatatcttcgtataaaaactagacagaatgattctcagaaactcctttgtgatgtgggtgttcaactcacagagtttaactttcttttcatagagctgttaggaaacactctgtaaagtctgcaagtgggtattttaacctctttgaggccttcgttggaaacgggtttttttcatgtaaggctagagagaagaattctcagtaacttccttttgttgtgtgtattaaactgacagagttgaactttcatttacacagagcagatttgaaacactctttttgtggtatttgcaagtggagatttcagccgctttgatgtcaatgatagaaaaggaaatatcttcatataaaaattagacagaatgattctcagaaactcctttgtgatatgggtgttcaactcacagagtttaacctttcctttcatagagcagttaggaaacactctgtttgtaaagtctgcaagtggatattttcacctctttgaggccttcgttggaaacgggttttttttcatgtaattctagacagaagaattctcagtaactttcttgtgttgtgtgtattcaactgacagagttgaactatcatttagagagtgcagatttgaaacactgtttttgtggaatttgtaagtggagatttcaagcgctttggggccaaaggcagaaaaggaaatatcttcgtataaaaactagacagaatcattctcagaaactgctgcgtgatgtgtgcgttcaactctcagagtttaacttttcctttcattcagcggtttggaaacactctgtttgtaaagtctgcacgtggaaattttgaccacttagtggccttcgttggaaacgggtttttttcatgtaaggctagacagaataattcccagtaacttccttgtgttgtgtacattcaactcacagagttgaacgttcccttagacagagcagatttgaaacactctttttgtgcaattggaaagtggagatttcaagcgcttaaggtcaatggcagaaaaggaaatatcttcgtttcaaaactagacagaatcattcccacaaactgcgttgtgatgtgttagttcaactcacagagtttaacctttcttttcatagagcagttaggaaacactctgtttgtaaattctgtaagtggatattctgacatcttgtggccttcgttggaaacgggatttcttcatattctgctagacagaagaattctcagtaacttccttgtgttgtgtgtattcaactcacagagttgaacgatcctttacacagagcagacttgaaacactctttttgtggaatttgcaagtggagatttcagccgctttgagttcaatgttagaataggaaatatcttcctatagaaactagacagaatgattctcagaaactcctttgtgatgtgtgcgttcaactcacagagtttaatctttcttttcatagagcagttaggaaacactctctaaagtctgcaagtggatattcagacctccttgaggtcttcgatggaaacgggatttcttcatattctgctagacagaagaattcccagtaacttccttgtgttgtgtgtgttcaactcacagagttgaactttcatttacacagagcagatttgaaacactctttttgtggaatttgcaagtggagatttcaagcgctttgaggccaaggcagaaaaggatatatcttcgtataaaaactagacagaatcattctcagaaactgctctgcgatgtgtgcgttcaactctcagagtttaacttttcttttcattcagctgtttggaaacactctgtttgtaaagtctgcacgtggatattttgaccacttagaggccttcgttggaaacgggtttttttacctgtaaggctagacagaagaattcccagtaacttccttgtgttgtgtgcattcaactcacagagttgaacgttcccttagacagagcagatttgaaacactctatttgtgcaatttgcaagtgtagttttcaagctctttaaggtcaacggcagaaaaggaaatatcttggtttcaaaactagacagaatgattctcagaaacgcctttgtgatgtgtgtgttcaactcacagagtttaacctttcttttcatagagcagttaggaaacactctgttggtaatgtctgcaagtggatattcagacctctttgaggccttcgttggaaacgggatttcttcatactgtgctagacagaagaattctcagaatcttccttgtgttgtgtgtattcaactcacagagttgaacgatcctttacacagagcggaattgaaacactctttttgtgaaatttgcaagtggagatttcagccgcgttgaggtcaatggtagaaaaggaaatctcttcgtataaaaactagacagaatgattctcagaaactcctttgtgatgtgtgcgttcaactcacagagtttaacctttcttttcatagagcagttaggaaacactctgtttgtaaagtctgcaagtggatattcacacctccttgaggccttcgttggaaacgggatttcttcatattatgctagacagaagaattctcagtaacttccttgtgttgtgtgtattcaactcacagatttcaacgatcctttacacagagcagacttgaaacactctttttgtggaatttgcaagtggagatttcagccgctttgaggtcaatggtagaataggaaatatcttcctatagaaactagacagaatcattctcagaaactgctctgcgatgtgtgcgttcaactctcagagtttaacttttcttttcattcagcagtttggaaacactctgtttgtaaagtctgcacgtggatattttgaccacttagaggccttcgttggaaacgggtttttttcctgtaaggctagacagtagaattcccagtaacttccttgtgttgtgtacattcaactcacagagttgaacgttcccttagacagagcagatttgaaacactctttttgtgcaattggcaaatggagatttcaagggctttaaggtcaatggcagaaaaggaaatatcttcgtttcaaaactagacagaatcattcccacaaactgcgttgtgatgtgttcgttcaactcacagggtttaacctttcttttcatagagcagttaggaaacagtctgtttgtcaattctgtaagtggatattctgacatcttgtggccttcgttggaaacgggatttcttcatattctgctagacagaagaattctcagtaacttccttgtgttgtgtgtattcaactcacagagttgaacgatcctttacacagagcagacttgtaacactctttttgtggaatttgcaagtggagatttcagccgctttgaagtcaaaggcagaaaaggaaatatcttcgtataaaaactagacagaatgattctcagaaactcctttgtgatgtgtgcgttcaacccacagagtttaacctttcttttcatagagcaattaggaaacactctgtttgtaaagtctgcacgtggatatttggacttctttgaggccttcgttggaaacgggtttttttcatgtaaggctagacagaagaattcccagtaacttccttgtgttgtgtgtgttcaactcacagagttgaactttcatttacacagagcagatttgaaatactctttttgtggaatttgcaggtggagatttcaagcgctttgaggccaaaggcagaaaaggaaatatcttcgtataaaaactagacagaatcattctcagaaactgctctgtgatgtgtgcgttcaactctcagagtttaacttttcttttcattcagcagtttggaaacactctgtaaagtctgcacgtagatattttgaccacttagaggccttcgttggaaacgggtttttttcatgtaaggctagacagaataattcccagtaacttccttgtgttgtgtacattcaactcacagagttgaacgttcccttagacagagcagatttgaaacactctttttgtgcaattggcaagtggagatttgaagcgctttaaggtcaatggcagaaaaggaaatatcttcgtttcaaaactagacagaatgattctcagaaaatcttttgtgatgtgtgcgttcaactcacagagtttaacttttcttctcatagagcagttaggaaacactctgtttgtaaagtgtgcaagtggatattcagacctccttgaggccttcgttggaaacgggatttcttcatattctgctagacagaagaattctcagtaacttccttgtgttgtgtttattcaactcacagggttgaatgatcctttacacagagcagacttgaaacactctttttgtggaatttgcaagtggagatttcagccgctttgaggtcaatggtagaaaagtaaatatcttcgtataaagactagacagaatgattctcagaaactcctttgtgatgtgtgcgttcaactcacagagtttaacctttcttttcatagagcagttaggaaacactctgtttgtaaagtctgcaagtggatattcagacctctttgaggccatcgttggaaacgggatttcttcatattctgctagagagaagaattctcagtaacttccttgtgttgtgtgtattcaactgagagagttgatctttcatttagagagatcagatttgaaacactgtttttgtggaatttgcaagtggagatttcaagcgctttggggccaaaggcagaaaaggaaatatcttcgtataaaaacttgacagaatcattctcagaaactgctgcgtgatctgtgcgttcaactctcagagtttaacttttcttttcattcagcggtttggaaacactctgtttgtaaagtctgcacgtggatattttgaccacttagaggccttcgttggaaacgggtttttttcatgtaaggctagacagaagaattcccagtaacttccttgtgttgtgtgcattcaactcacagagttgaacgttcccttagacagagcagatttgaaacactctatttgtgcaatttgcaagtgtagatttcaagcgctttaaggtcaacggcagaaaaaggaaatatcttcgtttcaaaactagacagaatcattcccacaaactgcgttgtgatgtgttcgttcaactcacagagtttaacctttctgttcatagagcagttaggaaacactctgtttgtaaagtctgtaagtggatattctgacatcttgtggccttcgttggaaaagggatttcttcatattttgctagacagaagaattcccagtaacttccttgtgttgtgtacattccactcacagagttgaacgttcccttagacagagcagacttgtaacactctttttgtggaatttgcaagtggagatttcagccgctttcaagtcaaaggtagaaaaggaaatatcttcctataaaaactagacagaatgattctcagaaactcctttgtgatgtgtgcgttcaactcacagagtttaacctttcttttcatagagcagttgggaaacactctgtttgtaaagtctgcaagtggatattcagacatctttgaggctttcgttggaaacgggatttcttcatattctgctagaaagaagaattcccagtaacttccttgtgttgtgtgtgttcaagtcacagagttgaactttcatttacacagagcagatttgaaacactctttttgtggaatttgcaagtggagatttcaagcgctttgaggccaaaggcagaaaaggaaatatcttcgtttcaaaactagacagaatcattctcagaaactgctctgtgatgtgtgcgttcaactcacagagtttaacttttcttttcattcagcagtttggaaacactctgcttgtaaagtctgcaagtggatatattgacctctttgagtccttcattggatacgggctttttccatgtaaggctagacagaagaattcccagtaacttctttgtgttgggtgcattcaactcacagagttgaacgttcctttagacagagcagatttgaaacactctttttgtgcaatttgcaagtggagatttcaagagctttaaggtcaatggcagaaaaggaaatatcttcgtttcaaaactagacagaatgattctcagaaactcctttgtgatgtgtgcgttcaactcacagagtttaacctttcttttcatagagcagttaggaaacactctgtttgtaaagtctgcatgtggatattcagacctctttgaggccatcgttggaaacgggatttcttcatattctgctagagagaagaattctcagtaacttccttgtgttgtgtgtattcaactcacagagttcaacgatgctttacacagaggagacttgaaacacactttttgttgaatttgcaagtggagatttcagccgatttgaggtcaatggtagaataggaaatatcttcgtataaaaactagacagaatgattctgagaaactcctttgtgatgtgtgcgttcaactcacagagtttaacctttcttttcatagagcagttaggaaacactctgtttgtaaagtgtgcaagtggatattcagacctccttgaggccttcgttggaaaggggatttcttcatattatgctagacagaagaattcccagtaccttccttgtgttgtgtgtgttcaactcacagagttgaactttcatttacacagagcagatttgaaacactctttttgtggaatttgcaagtggagatttcaagcgctttgaggccaaaggcagagaaggaaatatcttcgtttcaaaactagacagaatcattctcagaaactgctctgcgatgtgtgccgttcaactctcagagtttaactttgcttttcattcagcagtttggaaacactctgtttgtaaagtctgcacgtggataatttgaccacttagaggccttcgttggaaacgggtttttttcatgtaaggctagacagaagaattcccagtaacttccttctgttgtgtgcattccactcacagagttgaacgttcccttagacagagcagatttgaaacactctatttgtgcaatttgcaagtgtagatttcaagcgctttaaggtcaatggcagaaaaggaaatatcttcgtttcaaaactagacagaataattcccacaacctgcgttgtgatgtgttcgttcaactcacagagtttaacctttcttttcatagagcagttaggaaacagtctgtttgtcaattctgtaagtggatattctgacatcttgtggccttcgttggaaacgggatttcttcatattctgctagacagaataattctcagaaacttccttgtgttgtgtgtattcaactcacagagttgaacgatcctttacagagagcagacttgaaacactctttttgtggaatttgcaagtggagatttcagccgctttgaggtcagtggtagaataggaaatatcttcctatagaaactagacagaatgattctcagaaactcctttgtgatgtgtgcgttcaactcacagagtttaacctttcttttcatagagcagttaggaaacactctgtttctaaagtctgcaagtggatattcagacctgtttgaggccttcgttggaaacgggtttttttcatataaggctagacagaagaattctcagtaacttctttgtgttgtgtgtattcaactgacagagttgaactttcatttatagagagcagatttgaaacactgtttttgtggaatttgcaagtggagatttcaagcgctttggggccaaaggcggaaaaggaaatatcttcgtataaaaactagacagaatcattctcagaaactgctgcgtgatgtgtgcgttgaactctcagagtttaacttttcttttcattcagcggtttggaaacactctgtttgtaaagtctgcacgaggatattttgaccccttagaggccttcgttggaaacgggtttttttcatgtaaggctagacagaagaattcccagtaacttccttgttttgtgtgcattcaactcacagagttgaacgttcccttagacagagcagatttgaaacactctatttgtgcaatttgcaagtgtagatttcaagcgctttaaggtcaacggcagaaaaggaaatatcttcgtttcaaaactagacagaatcattcccacaaactgcgttctgatgtgttcgttcaactcacagagtttaacctttctgttcatagagcagttaggaaacactctgtttgtaaagtctgtaagtggatattctgacatcttgtggccttcgttggaaacgggatttcttcatattctgctagacagaagaattctcagtaactttccttgtgttgtgtgtattcaactcacagagttgaacgatcctttacacagagcagacttgtaacactctttttgtggaatttgcaattggagatttcagccgcgttgaggtcaatggtagaaaaggaaatatcttcgtataaaaactagacagaatgattctcagaaactcctttgtgatgtgtgcgctcaactcacagagttcaacctttcttttcatagagcagttaggaaacactctgtttgtaaagtctgcaagtggatattcagacctctttgaggccttcgtaggaaacgggatttcttcatattatgctagacagaagaattcccagtaacttccttgtattgtgtgtgttcgactcacagagttgaactttcatttacacagagcagatttgaaacactctttttgtggaatttgcaagtggagatttcaagcgctttgaggccaaaggcagaaaaagaaatatcttcgtttcaaaactagacagaatctttctcagaaactgctctgggatgtgtgcgttcaactcacagagtttaacttttctttccattcagcagtttggaaacactctgtttggaaagtctgcacgtggatattttgacctctttgaggccttcgttggaaacgggtttttttcatgtaaggctagacagaagaattctcagtaacttccttgtgttgtgtgtattcggctcacagagttgaacaatcctttacacagagcagacttgaaacactctttttgtggaatttgcaagtggagattacagccgctttgaggtcaatggtagaaaaggaaatatcttcgtataaagactagacagaatgattctcataaactcctttgtgatgtgtgcgttcaactcacagagtttaacttttcttttcatagagcagttaggaaacactctgtttgtaaagtctgtaagtggatattctgacatcttgtggccttcgttggaaacgggatttcttcatattctgctagacagaagaattctcagaaacttccttgtgttgtgtgtattcaactcacagagttgaacgatcctttacatagagcagacttgaaacactctttttgtggaatttgcaagtggagatttcagccgctttgaggtcaacggtagaataggaaatatcttcctatagaaactagacagaatgattctcagaaactcctttgtgatgtgtgcgttcaactcacagagtttaacctttcttttcatagagcagttaggaaacactctgtgtgtaaagtctgcaagtggataattcagacatccttgaggccttcgttggaaactggatttcttcatattatgctagacagaagaattctcagtaacttccttgtgttgtgtgtattcaactgacagagttgaactttcatttagagagatcacatttgaaacactgtttttgtggaatttgcaagtggagatttcaagcgctttggggccaaaggcagaaaaggaaatatcttcgtataaaaactagacagaatcattctcagaaactgctgcgtgatgtgtgcattcaactctcagagtttaacttttcttttcattcagcggtttggaaacactctgtttgtaaagtccgcacgtggatattttcaccacttagaggccttcttttgaaacggttttttgcatgtaaggctagacagaagaattcccagtaacttccttgtgttgtgtacattcaactcacagagttgaacgttcctttagacagagcagatttgaaacactctttttgtgcaattggcaagtggagatttcaagcgctttaaggtcaatggcagaaaaggaaatattttcgtttcaaaactagacagaatgattctcagaaacttcatttgtgaagtgtgcgttcaactcacagagtttaacctttcttttcatagagcagttaggaaacactctgtttgtaaactctgcaagtggatattcagacctctttgaggccttcgttggaaacgggatttcttcatactgtgctagacagaagaattctcagtaacttccttgtgttgtgtgtattcaactcacagagttgaacgatcctttacacagagcagacttgtaacactctttttgtggaatttgcaagtggagatttcagccgctttgaagtcaaaggtagaaaaggaaatatcttcctataaaaattagacagaatgattctcagaaactcctttgtgatgtgtgcgttcaactcacagagtttaacttttcttttcatagagcagttaggaaacactctttttgtaaagtctgcaagtggatattcagacctctttgaggccttcgttggaaacgggtttttttcatataaggctagacagaagaattcccagtaacttccttgtgttgtgtgtgttcaactcacagagttgaactttgatttacacagagcagatttgaaacactctttttgtggaatttgcaaatggagatttcaagcgctttgaggccaaaggaagaaaaggaaatatcttcgtataaaaactggacagaatgattctcagaaactgctctgtgatgtgtgcgttcaactctcagagtttaactttccttttcattcagcagtttggaaacactctgtttgaaaagtctgcacgtggataatttgaccacatagaggccttcgttggaaacgggtttttgtcatgtagggctagacagaagaattcccagtaacttccttgtgttgtgtacattcaactcacagagttgaacgttcccttagacagagcagatttggaacactctttttgtgcaattggcaagtggagatttcaagcgctttgaggtcaatggcagaaaaggaaatatcttcgtttcaaaactagacagaatcattcccacaaactgcgttgtgatgtgttcgttcatctcacagagtttaacctttcttttcatagagcagttaggaaacactctgtttgttaattctgtaagtggatattctgacatcttgtggccttcgttggaaacgggatttcttcatattctgctagacagaagaattctcagtaacttccttgtgttgtgtgtattcaactcacagagttgaatgatcctttacacagaacagtcttgaaacactctttttgtggaatttgcaagtggagatttcagccgctttgaggtcaatggtagaataggaaatatctacctatagaaattagacagaatgattctcagaaacttctttgtgatgtgtgcgttcaactcacagagtttaacctttcttttcatagagcagttaggaaacactgtgtttttaaactgtgcaagtggatattcagacctctttgaggccttcgttggaaacgggatttcttcatactgtgctggagagaagaattctcagtaacttccttgtgttgtgtgtattcaactgacagagttgaactttcatttagagagagcacatttgaaacactgtttttgtggaatttgcaagtggagatttcaagagctttggggccaaaggcagaaaaggaaatatcttcgtataaaaactagacagaaatcattctcagaaaactgctgcgtgatgtgtgcgttcaactctcagagtttaacttttcctttcattcagcggtttggaaacactctgtttgtaaagtctgcacgtggatattttgaacacttagaggccttcgttggaaacgggtttttttcatgtaaggctagacagaagaattcccagtaacttccttgtgttgtgtacattcaactcacagagttgaacgttcccttagacagagcagatttgaaacactctttttgtgcatttggcaagtggtgatttcagccgctttgaggtcaatggtagaaaaggaaatatcttcgtataaaaactagacagaatcattcccacaaactgcgttgtgatgtgttcgttcaactcacagagtttaacctttcttttcatagagcagttaggaaacagtctgtttgtcaattctgtaagtggatattctgacatcttgtggccttcgttggaaacgggatttcttcatattcctgctagacagaagaattctcagtaacttccttgtgttgtgtgtattcaactcacagagttgaacgatcctttacacagagcagacttgaaacactctttttgtggaatttgcaaatggagatttcagccgctttgatgtcaatggtagaaaaggtaatatcttcgtataaagactagacagaatgattctcagaaactcctttgtgatgtgtgtgttcaactcacagagttcaacctttcttttcatagagcagttgggaaacactctgtttgtaaagtctgcaagtggatattcagacttctttgaggccttctttggaagcgggatttcttcatgttctgctagacagaagtaattctcagtaacttccttgtgttgtgtgtattcaactcacagagttgaacgatcctttacacagagcagacttgtaacactctttttgtggaatttgcaagtggagatttcaagcgctttgaggccaaaggcagaaaaggaaatatcttcgtttcaaaactagacagaatcattctcagaaactgctctgcgatgtgtgcgttcaactctcagagtttaacttttcttttcattcagcagtttggaaacactctgtttgtaaagtctgcacgtggatattttgaccacttagaggccttcgttggaaacgggtttttttcctgtaaggctagacagtagaattctcagtaacttccttgtgttgtgtgtattcaactcacagagttgaacgatcctttacagagagcagacttgaaacactctttttgtggaatttgcaagtggagatttcagccgctttgaggtcaatggtagaataggaaatatctttctatagaaactagacagaatgattctcagaaactcctttgtgatgtgtgcgttcaactcacagagtttaacctttcttttcatagagcagttaggaaacactctgtttgtaaagtctgcaagtggatattcagacctctttgaggccttcgttggaaacgggatttcttcatattctgttacacagaagaattctcagtaacttccttgtgttgtgtgtattcaactcacagagttgaacgatcctttacacagagcagacttgaaacactctttttgtagaatttgcaagtggagatttcagccgctttgaggtcaatagtggaaaaggaaatatcttcgtagaaaaactagacagaatgattctcagaaactcctttgtgatgtgtgcgttcaactcacagagtttaacctttcttttcatagagcagttaggaaacactctgtttgtaaagtctgcaagtggatattcagacatcattgaggctttcgttggaaacgggatttcttcatattctgctagaaagaagaattcccagtaacttccttgtgttgtgtgtgttcaactcacagtaggtgaacggtcctttacacaggagcagatttgagacactctttttgtggaatttgctaatggagatttcaagcgctttgaggccaaaggcagaaaaggaaatatcttcgtataaaaactagacagaatcattctcagaaactgctctgcgatgtctgcgtacaactctcagagtttaacttttcttttcattcagcagtttggaaacactctgtttgtaaagtctgcacgtggataatttgaccacttagaggccttcgttggaaacgggtttttttcatgtaaggctagacagaagaattcccagtaacttccttgtgttgtgtacattcaactcacagagttgaacgttcccttagacagagcatatttgaaacactctttttgtgcaattggcaagtggagatttcaagtgctttaaggtcaatggcagaaaaggaaatatcttcgtttcaaaactagacagaatcattcccacaaactgcgttgtgatgtgttcgttcaactcacagagtttaacctttcttttcatagagcagttaggaaacagtctgtttgtaaattctgtaagtggatattctgacatttgtggccttcgttggaaacgggatttcttcatattttgctagacagaagaattctcagaaactttgttgtgttgtgtgttttcaactcacagagttcaacgatcctttacacagagtagacttgaaacactctttttgtggaattggcagggtggagatttcagccgctttgaggtcaatggtagaaaaggaaatatcttcgtataaaaactagacagagtgattctcagaaactcctttgtgatgtctgcgttcaactcacagagtttaacctttcttttcatagagcagtttggaaacactctgtttgtaaagtctgcaagtggatattcagacctccttgaggccttcgttggaaacgggatttcttcatattctgctatacagaagaattctcactaacttccttgtgttgtgtgtattcaactgacagagttgaacattcatttagagagagcagatttgaaacactgtttttgtggaatttgcaagtggagatttcaagcgctttggggccaaaggcagaaaaggaaatatcttcgtataaaaactagacagaatcattctcagaaactgctgcgtgatgtgtgcgttcaactctcagagtttaacttttcttttcattcagcggtttggaaacactctgtttgtaaagtctgcacgtggatattttgaccacttagaggccttcgttggaaacgggttttcttcatgtaaggctagacagaagaattcccagtaacttccttgtgttgtgtgcattcaactcacagagttgaacgttcccttagacagagcagatttgaaacactctatttgtccaatttgcaagtgtagatttcaagcgctttaaggtcaacggcagaaaaggaaatatcttcgtttcaaaactagacagaatgattctcataaactcctttgtcatgtgtgcgttcaactcacagagtttaacttttcttttcatagagcagttaggaaacactctgtttgtaaagtctgcaagtggatattcagacctctttgaggcctttgttggaaacgggatttcttcatattatgctagacagaagaattctcagtaacttccttgtgttgtgtgtattcaactcacagagttgaacgatcctttacacagagcagacttgaaacattctttttgtggaatttgtaagtggagatttcagccgctttgaggtcaatggtagaataggaaatatcttcctatagaaattagacagaatgattctcagaaactcctttgtgatgtgtgctttcaacgcacagagtttaacctttcttttcatagagcagttaggaaacactctgtttgtaaagtctgcaagtggatattcagacctccttgaggccttcgttggaaacgggagtttcttcctattatgctagacagaagaattctcagtaacttccttgtgttgtgtgtattcaactcacagagttgaactatcctttacacagagcagacttgaaacactctttttgtggaatttgcaagtggagatttcagccgctttgagttcaatggtagaataggaaatatcttcctatagaaactagacagataatcattctcagaaactgctgcgtgatgtgtgcgttcaactctcagagtttaacttttcttttcattcagcggtttggaaacactctgtttgtaaagtctgcacgtggatattttgaccacttagaggccttcgttggaaacgggtttttttcatgtaaggctagacagaagaattcccagtaacttccttgtgttgtgtgcattcaactcacagagttcaacgttcccttagacagagcagatttgaaacactctatttgtgcaatttgcaagtgtagatttcaagcgctttaatgtcaatggcagaaaaggaaatatcttcgtttcaaaactagacagaatcattcccacaaactgcgttgtgatgtgttcgttcaactcacagagtttaacctttcttttcatagagtagttaggaaacagtctgtttgtaaattctgtacgtggatattctgacatcttgtggccttcgttggaaacgggatttcttgatattctgctagacagaagaattctcactaacttccttgtgttgtgtgtattcaactcacagagttgaacgatcctttacacagaggagacttgaaacactctttttgtggaatttgcaagtggagatttcagccgctttgaggtcaatggtagaaaaggaaatatcttcgtataaagactagacagaatgattctcagaaactcctttgtgatgtgtacgttcaactcacagagtttaacctttcttttcatagagcagttaggaaacactctgtttgtaaagtctgcaagtggatattgagacctctttgaggccttcgttggaaacgggtttttttcatataaggctagacagaagaattctaagtaacttccttgtgttgtgtgtattcaactgacagagttgaactttcatttagagagagcagatttgaaacactgttttggtggaatttgcaagtggagatttcaagcgatttggggccaaaggcagaaaaggaaatatcttcgtataaaaactagacagaatcattctcaaaaactgctgcgtgatgtttgcgttcaactctcagagtttaacttttcttttcattcagcggtttggaaacactctgtttgtaaagtctgcacgtggatattttgaccacttagaggccttcgttggaaacgggtttttttcatgtaaggctagacagaagaattcgcagtaacttccttgtgttgtgtacattcaactcacagagttgaacgttcccttagacagagcagatttgaaacactctttttgtgcaattggcaaatggagatttcaagcgctttaaggtcaatggcagaaaaggaaatatcttcgtttcaaaactagacagaatgattctcataaactcctttgtgatgtatgcgttcaactcacagagtttaacctttcttttcatagagcagttaggaaacactctgtttgtaaagtctgcaagtggatattcagacctccttgaggccttcgttggaaacgggatttcttcatattatgctagacagaataattctcagtaacttccttgtgttgtgtgtattcaactcacagagttgaatgatcctttacacagagcagacttgaaacactctttttgtggaatttgcaagtggagatttcagccgctttgaggtcaatggtagaaaagtaaatatcttcgtatgaagactagacagaatgattctcagaaactcctttgtgatgtgtgcgttcaactcacagagtttaacctttcttctcatagagcagttaggaaacactctgtttgtaaagtctgcaagtggatattcagacctctttgaagccttcgttggaaacgggatttcttcatattatgctagacagaagatttcccagtaacttccttgtgttgtgtgtgttcaactcacagagttgaactttcatttacacagagcagatttgaaacactctttttgtggaatttgcaaatggagatttcaagcgctttgaggccaaaggcagaaaaggaaatatcttcgtataaaaactagacagaatcattctcagaaactgctctgcgatgtgtgcgttcaactctcagagtttaacttttcttttcattcagcagtttggaaacactctgtttgtaatgtctgcacgtggatattttgaccacttagaggccttcgttggaaacgggtttttttcctgtaaggctagacagaagaattcccagtaacttccttgtgttgtgtacattcaactcacagagttgaacgttcccttagacagagcagatttgaaacactctttttgtgcaattagcaagtggagatttcaagcgctttaaggtcaatggcagaaaaggaaatatcttactttcaaaactagacagaatcattcccacaaactgcgttgtgatgtgttcgttcaactcacagagtttaacctttcttttcatagagcagttaggaaacactctgtttgtaaattctgtaagtggatattctgacatcttgtggccttcgttggaaacgggatttcttcatattctgctagacagaagaattcctcagtaacttcccttgtgttgtgtgtattcaactcacagagttgaacgatcctttacacagagcagacttgaaacactcgttttgtggaatttgcaagtggagatttcagccgcgttgaggtcaatggtagaaaaggaaatatcttcgtataaaaactagacagaatgattctcagaaaatcctttgtgatgtgtgcgttcaactcacagagtttaacttttcttttcatggagcagttaggaaacactctgtttgtaaagtctgcaagtgaatattcagacctctttgaggccttcgttggaaacgggatttcttcatattatgctagacagaataattctcagtaacttccttgtgttgtgtgtattcaactcacagagttgaacgatcctttacagagagcagacttgaaacactctttttgtggaatttgcaagtggagatttcagccgctttgaggtcaatggtagaataggaaatttcttcctatagaaactagacagaatcattctcagaaactgctctgcgatgtgtgcgttcaactctcacagtttaacttttcttttcattcagcagtttggaaacactctgtttgtaaagtctgcacgtggataatttgaccacttagaggccttcgttggaaacgggtttttttcatgtaaggctacacagaagaattcccagtaacttccttgcgttgtgtacattcaactcacagagttgaacgttcccttagacagagcagatttgaaacactctttttgtgcaattggcaagtggagatttcaagcgctttaaggtcaatggcagaaaaggaaatatcttcgtttcaaaactagacagaatcattcccacaaactgcgttgtgatgtgttcgttcaactcacagagtttaaccattcttttcatagagcagttaggaaacagtctatttgaaaattctgtaagtggatattctgacatcttgtggccttcgttggaaacgggatttcttcatattctgctagacagaggaattctcaggaacttccttgtgttgtgtgtattcaactcacagagttgaacgaccctttacacagagcagacttgaaacactctttttgtggaatttgcaagtggagatttcagccgctttgagttcaaatgtagaataggaaatatcttcctatagaaagtacacagaatgattctcagaaaatcctttgtgatgtgtgccttcaactcacagagtttaacttttcttttcatcgagcagttaggaaacactctgtttgtaaagtctgcaagtggatattcagacgtctttgaggccttcgttggaaacgggatttcttcatattatgctagacagaagaattcccagtaacttccttgtgttgtgtgtgttcaactcacagagttgaactttcatttacacagagcagatttgaaaccctctttttgtggaatttgcaaatggagatttcaagcgctttgaggccaaaggcagaaaaggaaatatcttcgtataaaaactagacagaatcattctcagaaactgctctgcgatgtgtgcattcaactctcagagtttaatttttcttttcattcagcagtttggaaacattctctttgtaaagtctgcacgtggatattttgacaacttagaggccttcgttggaaacgggttttattcttgtaaggctagacagaagaattcccagtaacttccttgtgttgtgtgcattcaactcacagagctgaacgttcccttagacagagcagatttgaaacactctatttgtgcaatttgcaagtgtagatttcaagcgctttaaggtcaatggcagaaaaggaaatatcttcgtttcaaaactagacagaatcattcccacaaactgctttgtgatgtgttcgttcaactcacagagtttaaactttcttttcatagagcagttaggaaacagtctgtttgtcaattctgtaagtggatattctgacatcttgtggccttcgttggaaacgggatttcttcatattctgctagacagaagaattctcagtaacttccttgtgttgtgtttattcaactcacagagttgaatgatcctttacacagagcagacttgaaacactctttttgtggaatttgcaagtggagatttcagccgctttgaggtcaatgttagaaaaggaaatatcttcgtataaagactagacagaatgattctcagaaactcctttgtgatgtgtgcgttcaactcacagagtttaacttttcttttcatagagcagttaggaaacactctgtttgtaaagtctgcaagtggatattcagacctctttgagtccttcattggaaacgggatttcttcatattatgctagacagaagaattctcagtaacttccttgtgttgtgtgtattcaactcacagagttgaacgatcctttacactgagcagacttgaaacattctttttgtggaatttgcaagtggagatttcagccgctttggggtcaatggtagaataggaaatatcttcgtagaagaactagacagaatcattctcagaacctgctgcgcgatgtgtgcgttcaactctcagagtttaacttttcttttcattcagcggtttggaaacactctgtttgtaaagtctgcacgtggatattttgaccacttagagtccttcgttggaaacgggtttttttcatgtaaggctagacagaagaattcccagtaacttccttgtgttgtgtacattcaactcacagagttgaacgttcccttagacagagcagatttgaaacactctttttgtgcaattggcaagtggagatttcaagcgctttaaggtcaatggcagaaaaggaaatatcttcgtttcaaaactagacagaatcattcccagaaactgcgttgtgatgtgttcgttcaactcacagagtttaacctttcttttcatagagcagttaggaaacactctgtttgtaaagtctgtaagtggatattctgacgtcttgtggccttcgttggaaacgggatttcttcatattctgctagacagaagaattctcagtaacttccttgtgttgtgtgtattcaactcacagagttgaatgatcctttacacagaacagacttgaaacactctttttgtggaatttgcaagtggagatttcagccgctttgaggtcaacggtagaataggaaatatcttcctatagaaactagacagaatgattctcagaaactgctttgtgatgtgtgcgttcaactcacagagtttaaccttccttttcatagagcagttaggaaacactctgtttgtaaaatctgcaattggatattcagacctctttgaggccttcgttgcaaacgggatttctttatgttatgctacacagaagaattctcagtaacttccttgtgttgtgtgtattcaactcacagagttgaactttcatttacacagagcagattggaaacactcttttgtggaatttgcaagtggagatttcaagcgctttgaggccaaaggcagaaaaggaaatatcttcgtataaaaactagacagaatcattctcagaaactgctctgcgatgtgtgcgttcaactctcagagtttaacttttcctttcattcagcagtttggaaacactctgtttgtaaagtctgcacgtgcataatttgaccacttagatgccttcgttggaaacgggttttttccatgtaaggctagacagaagaattctcagtaacttccttgtgttgtgtgtattcaactcacagagttgaacgatcctttacacagagcagacttggaacactctttttgtggaatttgcaagtggagatttcagccgctttgaggtccatggtagaaaaggaaatatcttcgtataaaaaccagacagaatcattcccacaaacttgggttgtgatgtgttcgttcaactcacagagtttaacctttcttttcatagagcagttaggaaacagtctgtttgtcaattctgtaagtggatattctgacatcttgtggccttcgttggaaacgggatttcttcatattctgctagacagaataattctcagtaacttccttgtgttgtgtgtattcagctcacagagttgaacgatcctttacacagagcagacttgaaacactctttttgtggaatttgcaagtggagatttcagccgctttgaggtcaatagtagaaaaggaaatatcttcgtagaaaaacaagacagaatgattctcagaaactcctttgtgatgtgggcgttcaactcacagagtttaacctttcttttcatagagcagttaggaaacactctgtttgcaaagtctgcaagtggatattcagacctctttgacgccttcgttggaaacgggatttcttcatattctgctagacagaagaattctcagtaacttctttgtgttgtgtgtattcaactgacagagttgaactttcatttagagagagcagatttgaaacactgtttttgtggaatttgcaagtggagatttcaagcgctttggggccaaaggcagaaaaggaaatatcttcttataaaaactagacagaatcattctcagaaaccgctctgtgatgtgtgcgttcaactcgcagagtttaacttttcttttcattcagcagtttggaaacactctgtttgtaaagtctgcacgtggatattttgaccacttagaggccttcgttggaaacgggttttttttcatgtaaggctagacagaagaattcccagtaacttccttgtgttgtgtgcattcaactcacatagttgaacgttcccttagacagagcagatttgaaacactctatttgtgcaatttgcaagtgtagatttcaagcgctttaaggtcaatggcagaaaaggaaatatcttcgtttcaaaactagacagaatcattcccacaaactgcgttgtgatgtgttcgttcaactcacagagtttaacctttctgttcatagagcagtgaggaaacactctgtttgtaaagtctctaagtggatattctgacatcttgtggccttcgttggaaacgggatttcttcatattctgctagacagaagaattctcagtaacttccttgtgttgtgtgtattcaactcacagagttgaacgatcctttacacagagcagaattgaaacattctttttgtggaatttgcaagtggagatttcagccgctttgaggtcaatggtagaataggaaatatgttcctatagaaactagacagaatgattctcagaaactcctttgtgatgtgtgtgttcaactcacagagtttaacctttcttttcctagagcagttagtaaacactctgtttataaagtctgcaagtggatattgagacccctttgaggccttcgttggaaacgggatttcttcatattatgctagacagaagaattcccagtaacttccttgtgttgtgtgtgttctactcacagagttgaactttcatttacacagagcagatttgaaacactctttttgtggaatttgcaaatggagatttcaagcgctttgaggccaaaggcagaaaaggaaatatcttcgtataaaaactagacagaatcattctcagaaactgctctgcgatgtgtgcgttcaactctcagagtttaacttttcttttcattcagcagtttggaaacactctgtttgtaaagtctgcacgtggataatttgaccacttagaagccttcgttggaaacgggtttttttcatgtaaggctagacagaagaattctcagtaacttcccttgtgttgtgtgtattcaactcacagagttgaacgatcctttacacagagcagacttgtaacactctttttgtggaatttgcaagtggagatttcagccgctttgatgtcaaaggtagaaaaggaaatatcttcctataaaaactagacagaatgattctcagaaactcctttgtgatgtgtgcgttcaactcacagtttaacctttcttttcatagagcagttaggaaacactctgtttgtaaagtctgcaagtggatattcagacctctttgaggctttccttggaaacgggatttcttcctattctgctagacagaataattctcagtaacttccttgtgttgtgtgtattcaactcacagagttgaacgatcctttacacagagcagacttgaaacattctttttgtggaatttgcaactggagatttcagccgctttgaggtcaatggtagaataggaaatatcttcctatagaaactagacagaatgattctcagaaactcctttgtgatgtgtgcgttcaactcacaaagtttaacctttcttttcatagagcagttaggaaacactctgtttgtaaagtctgcaagtggatattcagacctctttgaggccttcgttggaaacgggatttgttcatactatgctagacagaagaattctcagtaacttccttgtgttgtgtgtattcaacttacagagttgaactttcatttagagagagcagatttgaaacactgtttttgtggaatttgcaattggagatttcaagcgctttggggccaaaggcagaaaaggaaatatcttcgtataaaaactagacagaatcattctcagaaactgctgcgtgatgtgtgcgttcaactctcagagtttaacttttcttttcattcagcggtttcgaaacactctggttgtaaagtctgcacgtggatattttgaccacttagagtccttcgttggaaacgggttttttgcatgtaaggctagacagaagaattcccagtaacttccttgtgttgtgtgcattcaactcacagagttgaacgttcccttagacagagcagatttgaaacactctatttgtgcagtttgcaagtgtagatttcaagcgctttaaggtcaatggcagaaaaggaaatatcttcgtttcaaaactagacagaatgattctcagaaactcctttgtgatgtgtgcgttcaactcacagagtttaacctttcttttcatagagcagttaggaaacactctgtttgtaaagtctgcaagtggatattcagacatccttgaggctttctttggaaacgggatttcttcatattctgctagaaagaagaattctcagtaacttccttgtgttgtgtgtattcaactcacagagttcaacgatcctttacacagagtagacttgaaactctttttgtggaattggcagggtggagatttcagccgctttgaggtcaatggtagaaaaggaaatatcttcgtataaaaactagacagaatgattctcagaaactgctttgtgatgtgtgcgttcaactcacagagttcaacctttcttttcatagagcagttagggaacactctgtttgtaaagtctgcaagtggatatccagacctctttgaggccttcgttggaaacgggttttcttcatattatgctagacagaagaattctcagtaacttccttgtgttgtgtgtattcaactgacagagttgaactttcatttagagagagcagatttgaaacactgtttttgtggtatttgcaagtggagatttcaagcgctttggggccaaaggcagaaaaggaaatatcttcgtataaaaactagacagaatcattctcagaaactgctgcgtgatgtgtgcgttcaactctcagagtttaacttttcttttcattcagcggtttggaaacactctgtttgtaaagtctgcacgtggatattttgaccacttagaggccttcgttggaaacgggttttatgcatgtaagcctagacagaagaattcccagtaacttccttgtgttgtgtgcattcaactcacagagttgaacgttcccttagacagtgcagatttgaaacactctatttgtgcaatttgcaagtgtagatttcaagcgctttaaggtcaatggcagaaaaggaaatatcttcgtttcaaaactagacagaatcattcccacaaactgcgttgtgatgtgttcgttcaactcacagagtttaacctttcttttcatagagcagttaggaaacagtctgtcaattctgtaagtggatattctgacatcttgtggccttcgttggaaacgggatttcttcatattctgctagacagaagaattctcagtaacttccttgtgttgtgtgtattcaactcacagatttgaacgatcctttacacagagcggagttgaaacactctttttgtggaatttgcaagtggagatttcagccgcgttgaggtcaatggtagaaaaggaaatatcttcgtataaaaactagacagaatgattctcagaaacttctttgtgatgtgtgcgttcaactcacagagtttaacctttcttttcatagagcagttaggaaacactctgtttgtaaactctgcaagtggatattcagacctctttgaggccttggttggaaacgggatttcttcatactatgctagacagaagatttctaagtaacttccttgtgttgtgtgtattcaactgacagagtttaactttcatttagagagagcagatttgaaacactgttttcgtggaatttgcaagtggagatttcaagcgctttggggccaaaggcagtaaaggaaatatcttcgtataaaaactagacagaatcattctcagaaactgctctgtgatgtgtgcgttcaactctcagagtttaacttttgttttcattcagcagtttggaaacactctgtttgtaaagtctgcacgtggatattttgaccacttagaggccttcgttggaaactggtttttttcaagtaaggctagacagaagaattcccagtaacttccttgtgttgtgtgcattcaactcaaagagttgaacgttcccttagacagagcagatttgaaacactctatttgtgcaatttgcaagtgtagatttcaagcgctttaaggtcaatggcagaaaaggaaatatcttcgtttcaacacaagacagaatcattcccacaaactgcgttgtgatgtgttcgttcaactcacagagtttaacctttctgttcatagagcagttaggaaacactctgtttgtaaagtctgtaagtggatattctgacatcttgtggccttcgttggaaaagggatttcttcatattctgctagacagaagaattctcagtaacttccttgtgttgtgtttattcaactcacagagttgaacgatcctttacacagagcagacttgaaacactctttttgtggaatttgcaagtggagatttcagccgctttgaggtcaatggtagaaaagtaaatatcttcgtataaagactagacagaacgattctcagaaactcctttgtgatgtgtgcgttcaactcacagagtttaacctttcttttcatagagcagttaggaaacactctgtttgtaaagtctgtaagtggatattctgacattttctggccttcattggaaaagggatttcttcatattctgctagacagaagaattctcagtaacttccttgtgttgtgtgtattcaactcacagagttgaatgatcctttacagagatcagacttgaaacactctttttgtggaatttgcaagtggagatttcagccgctttgaggtcaatggtagaatagaaatatcttcctatagaaactagacagaatcattctcagaaagtgctctgcgatgtgtgcgttcaactctcagagtttaacttttcttttcattcagcagtttggaaacactctgtttgtaaagtctgcacgtggatattttgaccacttagaggccttcgttggaaacgggtttttttcctgtaaggctagacagaagacttcccagtaacttccttgcgttgtgtacattcaactcacagagttgaacgttcccttagacagagcagatttgaaacactctttttgtgcaattggcaagtggagatttcaagcgctttgaggtcaatggcagaaaaggaaatatcttcgtttcaaaactagacagaatcattcccacaaactgcgttgtaatgtgtgcgttcaactcacagagtttaacctttcttttcatagagcagttaggaaacactctgtttgtgaagtctgcaagtggatattcagacctctttgaggccttcgttggaaacgggatttcttcatattctgctagacagaagaattctcagtaacttccttgtgttgtgtgtattcaactcacagagttgaacgatcctttacacagagcagacatgaaacactctttttgtggaatttgcaggtggagatttcagccgctttgaggtcaatggtagaataggaaatatcttcctatagaaactagacagaatgattctcggaaactcctttgtgatgtgtgcgttcaactcacagagtttaacctttcttttcatagagcagttaggaaacactctgtttgtaaagtctgcaagtggatattcagacctctttgaggccttcgttggaaacgggtttttttcatataaggctagacagaagaattctcagtaacttccttgtgttgtgtgtattcaactgacagagttgaactttcatttagagagagcagatttgaaacactctttttgtggaatttgcaagtggagatttcaagcgctttggggccaaaggcagaaaacgaaatatcttcgtataaaaactagacagaatcattctcagaaactgctctgcgatgtgtgcgttcaactctcagagtttaacttttcttttcattcagcagtttggaaacactctgtttgtaaagtctgcacgtggataatttgaccacttagaggccttctttggaaacgggttttttttcatataaggctagacagaagaattcccagtaacttccttgcgttgtgtacattcaactcacagagttgaacgttcccttagacagagcagatttgaaacactctttttgtgcaattggcaagtggagatttcaagcgctttaaggtcaatggcagaaaaggaaatatcttcgtttcaaaactagacagaatcattcccacaaactgcgttgtaatgtgtgcgttcaactcacagagtttaacctttcttttcatagagcagttaggaaacactctgtttgtaaagtctgcaagtggatattcagacctctttgaggccttcgttggaaacgggatttcttcgtattctgctagacagaggaattctcagtaacttccttgtgttgtgtgtattcaactcacagagttgaacgatcctttacacagagcagacttgaaacactctttttgtggaatttgcaagtggagatttcagccgctttgaggtcaatggtagaataggaaatatcttcctatagaaactagacggaaatgattctcagaaactcctttgtgatgtgtgtgttcaactcacagagtttaacctttcttttcatagagccgttaggaatcactctgtttgtaaagtctgcaagtggatattcagacctctttgaggccttcgttggaaacgggtttttttcatataaggctagacagaagaattctcagtaacttccttgtgttgtgtgtgttcaactcacagagttgaactttcatttacacagagcagatttgaaacactctttttgtggaatttgcaagtggagatttcaagcgctttgaggccaaaggcagaaaaggaaatatcttcgtataaaaactagacagaatcattctcagaaactgctgcgtgatgtgtgagttcaactctcagagtttaacttttcttttcattcagcggtttggaaacagtctgtttgtaaagtctgcacgtggatattttgaccacttagaggccttcgttggaaacgggattttttcatgtaaggctagacagaagaattcccagtaacttccttgtgttgtgtgcattcaactcacagagttgaacgttcccttagacagagcagatttgaaacactctatttgtgcaatttgcaagtgtagatctcaagcgctttaaggtcaatgggagaaaaggaaatatcttcgtttcaaaactagacagaatcattcccacaaactgcgttgtgatgtgttcgttcaactcacagagtttaaactttctgttcatagagcagttaggaaacactctgtttgtaaagtctgtaagtggatattctgacatcttgtggccttcgttggaaacgggatttcttcatattctgctggacagaagaattctcagtaacttccttgtgttgtgtgtattcaactcacagagttgaacgatcctttacacagagcagacttgaaacactctttttgtggaatttgcaagtggagatttcagccgctttgagttcaatggtagaataggaaatatcttcctatagaaagtacacagaatgattctcagaaactcctttgtgatgtgtgcattcaactcacagagtttaacctttcttttcatagagcagttaggaaacactgtttgtaaagtctgcaagtggatattcagacctccttgaggccttcgttggaaacgggatttcttcatattatgctagacagaagaattctcagtaacttccttgtgttgtgtgtattcaactgacagagttgaactttcatttagagagagcagatttgaaacactgtttttgtggaatttgcaagtggagatttcaagcgctttggggccaaaggcagaaaagaaaatatcttcgtataaaaactagacagaatcattctcagaaactgctctgcgatgtgtgcgttcaactctcagagtttaacttttcttttcattcagcagtttggaaacactctgtttgtaaagtctgcacgtggataatttcaccacttagaggtcttcgttggaaacgggtttttttcatgtaaggatagacagaagaattctcagtaacttccttgtgttgtgtgtattcaactcacagagttgaacgatcctttacacagagcagacttgtaacactctttttgtggaatttgcaagtggagatttcagccgctttgaagtcacaggtagaaagggaaatatcttcctataaacactagacagagtgattctcagaaacttctttgtgatgtctgcgttcaactgacagagtttaacctttcttttcatagagcagttaggaaacactctgtttgaaaagtctgcaagtggatactcagacctccttgaggccttcgttggaaacgggatttcttcatattatgctagacagaggaattctcagtaacttccttgtgttgtgtgtattcaactcacagagttgaacgatcctttacacagagcagacttgaaacactctttttgtggaatttgcaagtggagatttcagccgctttgaggtcaatggtagaataggaaatatcttcctacagaaactagacagaatgattctcagaaactcctttgcgatgtgtgcgttcaactcacagagtttaacctttcttttcatagagcagttaggaaacactctgtttgtaaagtctgcaagtggatattcagacatctttgaggctttcgttggaaacgggatttcttcatattctgctagacagaagaattctcagtaacttccttgtgttgtgtgtattcaagctgacagagttgaactttcatttagagagagcagatttgaaacactgtttttgtggaatttgcaaatggagatttcaagcgctttgggaccaaaggcagaaaaggaaatatcttcgtataaaaactagacagaatcattctcagaaactgctgcgtgatgtgtgcgttcaactctcagagtttaacttttcttttcattcagcggtttggaaacactctgtttgtaaagtctgcacgtggaaattttgaccacttagaggccttcgttggaaacgtgtttttttcatgtaaggctagacagaagaattcccagtaacttccttgtgttgtgtgcattcaactcacagagttgaacgttcccttagacagagcagatttgaaacactctatttgtgcaatttgcaagtgtagttttcaagctctttaaggtcaacggcagaaaaggaaatatcttcgtttcaaaactagacagactcattcccaaaaactgcgttgtgatgtgttcgttaaactcacagagtttaacctttctgttcatagagcagttaggaaacactctgtttgtaaagtctgtaagtggaaattctgacatcttgtggccttcgttggaaacgggatttcttcatattatgctagacagaagaattctcagtaacttccttgtgttgtgtgtattcaactcacagagttgaacgatcctttacacagagcagacttgaaacactctttttgtggaatttgcaagtggagatttcagctgctttgaggtcaatggtagaataggaaatatcttcctatagaaactagacagaatgattctcataaactcctttgtgatgtgtgcgttcaactcacagagtttaacctttcttttcatagagcagttaggaaacactctgtttgtaaagtctgcaagtggatattcagacatccttgaggctttcgttggaaacgggatttcttcatattctgctagaaagaagaattctcggtaacttccttgtgttgtgtgtattcaactgacagagttgaactttcatttagagagagcagatttgaaacactgtttttgcggaatatgcaagtggagatttcaagcgctttggggccaagggcagaaaaggaaatatcttcgtttaaaaactagacagaatcattctcagaaactgctgcgtgatgtgtgcgttcaactctcagagtttaacttttcttttcattcagtggtttggaaacactctgtttgtaaagtctgcacgtggatattttgaccacttagaggctttcgttggaaacgggtttttttcatgtaaggctagacagaataattcccagtaacttctttgtgttgtgtacattcaactcacagagttgaacgttcccttagacagagcagatttgaaacactctttttgtggaattggcaagtggagatttcaagcgctttaaggtcagtggcagaaaaggaaatatcttcgtttcaaaactagacagaatcattcccaaaaactgcgttgtgatgtgttccttcatctcagagagtttaacctttcttttcagagagcagttaggaaacagtctgtttgtaaattctgtaagtggatattctgacatcttgtggccttcgttggaaacgggatttcttcatattctgctagacagaagaattctcagaatcttccttgtgttgtgtgtattcaactcacagagttgaacgatggtttactcagagcagatttgaaacactctttttgtggaatttgcaagtggagatttcagccgctttgaggtcaatggtagaaaaggaaatatcttcgtataaaaactagacagaatgattctcagaaactcctttgtgatgtgtgcgttcaactcacagagtttaacttttcttttcatagagcagttaggaaacactctgtgtgtaaagtctgcaagtggatattcagacctctttgaggccttcgttggaaacgggatttctccatattatgctagacagaagaattctcagaatcttccttgtgttgtgtgtattcaacgcacagagttgaacgatcctttacacagagcagacttgaaacactctttttgtggaatttgcaagtggagatttcagccgctttgaggtccatggtagaaaaggaaatatcttcgtataaaaactagacagaatgattctcagaaactccttggtgatgtgggcgttcaactcacagagtttaacctttcttttcatagagccgttaggaaacactctgtttgtaaagtctgcacgtggatatttggacttctttgaggccttcgttggaaacgggtttttttcatgtaaggctagacggaagaattctcagtaacttccttgtgttgtgtgtattcaactgacagagttgaactttcatttagagagagcagatttgaaacactgtttttgtggaatttgcaagtggagatttcaagcgctttggggccaaaggcaggaaaggaaatatcttcgtataaaaactagacagaatcattctcagaatctgctgcgtgatgtgtgcgttcaactctcagagtttaacttttcttttcattcagcggtttggaaacactctgtttgtaaagtctgcacgtggatattttgaccacttagaagccttctttggaaacggtttttcttcatgtaaggctagacagaagaattcccagtaacttccttgtgttgtgtgcattcaactcacagagttgaacgttcccttagacagagcagatttgaaacactctatttgtgtaatttgcaagtgtagatttcaagcgctttaaggtcaacggcagaaaaggaaatatcttcgtttcaaaattagacaggatcattcccacaaactgcgttgtgatgtgttcgttcaactcacagagtttaacctttcttttcatagagaagttaggaaacactctgtttgtaaagtctgcaagtggatattcagacttccttgaggccttcgttggaaacgggatttcttcatattctgctagacagaagaattctcagtaacttccttgtgttgtgtgtattcaactcacagatttgaatgatcctttacacagagcagacttgaaacactctttttgtggaatttgcaagtggagatttcagccgctttgagttcaatggtagaataggaaatatcttcctatagaaactagacagaatgattctcagaaactcctttgtgatgtgtgcgttcaactcacagagtttaacctttcttttcatagagcagttaggaaacactctgtttgtaaagtcagcaactggatattcagacctccttgtggccttctttggaaacgggatttcttcatattatgctagacagaagaattctcagtaacttccttgtgttgtgtgtattcaactgacagagttgaactttcatttggagagagcagatttgaaacactgtttttgtggaatttgcaagtggagatttcaagcgctttggggccaaaggcagaaaaggaaatatcctcgtataaaaacaagacagaatcattctcagaaactgctgcgtgatgtgtgcgttcaactctcagagtttaacttttcttttcattcagcggtttggaaacactctgtttgtaaagtctgcacgtggatattttgaccacttagaggtcttcgttggaaacgggttttttttaatgtaaggctagacagaagaattcccagtaacttccttgtgttgtgtgcattcaactcacagagttgaacgttcccttagacagagcagatttgaaacactctatttgtgcaatttgcaagtgtagttttcaagctctttaaggtcaacggcagaaaaggaaatatcttcgtttcaaaactagacagaatcattcccacaaactgcgttgtgatgtgttcgttcaactcacagagtttaacctttcttttcatagagcagttaggaaacagtctgtttgtcaattctgtaagtggatattctgacatcttgtggccttcgttggaaacaggatttcttcatattctgctagacagaagaattctcagtaacttccttctgttgtgtgtattcaactcacagagttgaacgatcctttacacagagcagacttgaacacaactctttttgtggaatttgcaagtggagatttcagccgctttgaggtcaatagtagaaaaggaaatatcttcgtagaaaaactagacagaatgattctcagaaacttctttgtgatgtgtgcgttcaactcacagagtttaacctttcttttcatagagcagttaggaaacactctgtttgtaaactctgcaagtggatgttcagacctctttgaggccttcgttggaaacgggatttcttcatactatgctagacagaagaattcccagtaacttccttgtgttgtgtgtgttcaactcacagagttgaactttcatttacccagagcagattcgaaacactctttttgtggaatttgcaagtggagatttcaagcgctttgaggccaaaggcagaaaaggaaatatcttcgtttcaaaactagacagaatcattctcagaaactgctctgcgatgtgtgcgttcaactctcagattttaacttttcttttcattcagcagtttggaatcactctgtttgtaaagtctgcacgtggatattttgaccacttagaggccttcgttggaaacgggtttttttcctgtaaggctagacagaagaattcccagtaacttccttgcgttgtgtacattcaactcacagagttgaacgttcccttagacagagcagatttgaaacactctttttgtgcaattggcaagtggagatttcaagcgctttaaggtcaatggcagaaaaggaaatatcttcgtttcaaaactagacagaatcattcccacaaactgcgttgtgatgtgttcgttcatctcacagagtttaacctttcttttcatagagcagttaggaaacactctgtttgtaaattctgtaagtggatattctgacatcctggtggccttcgttggaaacgggatttcttcatattctgctagacagaagaattctcagaaacttccttgtgttgtgtgttttcaactcacagagttgaacgatcctttacacagagcagacttgaaacactccttttgtggaatttgcaagtggagatttcagccgctttgaggtcaatggcagaataggaaatatcttcctatagaaactagacagaatgattctcagaaactcctttgagatgtgtgtgttcaactcacagagtttaacctttcttttcatagagcagttaggaaacactctgtttgtaaagtctgcaggtggatattcagacctctttgaggccttcgttggaaacgggtttttttcatataaggctagacagaagaattcccagtaacttccttgtgttgtgtgtgttcaactcacagagttgaactttcatttacagagagcaggtttgagacacactttttgtggaatttgctaatggagatttcaagcgctttgaggccaaaggcagaaaaggaaatatcttcgtataaaaactagacagaatcattctcagaaactgctgcgtgatgtgtgcgttcaactctcagagtttaacttttcttttcattcagcggtttggaaacactctgtttgtaaagtctgcacgtggatattttgaccacttagaggccttcgttggaaacgggtttttttcatgtaaggctagtcagaagaattctcagtaactgccttgtgttgtgtttattcaactcacagagttaaacgatcctttacacagagcagacttgaaatactctttttgtggaatttgcaagtggagatttcagccgctttgaggtcaatggtagaataggaaatatcttcctatagaaactagacagaatgattctcagaaactcctttgtgatgcgtgcgttcaactcacagagtttaacctttcttttcatagagcagttaggaaacactctgtttgtaaagtctgcaagtggatattcagacatccttgaggctttcgttggaaacgggatttcttcgtattctgctagaaagaagaattctcagtaacttccttgtgttgtgtgtattcaactcacagagttgaacgatcctttacacagagcagacttgaaacactctttttgtggaatttgcaagtggagatttcagccgatttgaggtcaatggtagaaaaggaaatatcttcgtataaagactagacagaatgattctcagaaactcctttgtgatgtgtgcgttcaactcacagagtttaacctttcttttcatagagcagttaggaaacactctgtttgtaaagtctgcaagtggatattcagacctccttaaggccttcgttggaaacgggatttcttcatattatgctagacagaagaattctcagtaacttccttgtgttgtgtgtattcaactcacagagttcaacgatcctttacacagagcagacttgaaacactctttttgtggaatttgcaagtggagatttcagccgctttgaggtcaatggtagaataggaaatatcttcccatagaaactagacagaatgattctcacaaactcctttgtgatgtgtgcgttcaactcacagagttaaacctttcttttcatagagcagttaggaaacactctgtttgtaaagtctgcaagtggatattcagacctccttgaggccttctttggaaaggggatttcttcatattatgctagacagaagaattctcagaaacttccttgtgttgtgtgtattcaactctcagagttgaacgaccctttacacagagcagacttgaaacactctttttgcggaatttgcaagtggaggtttcagccgctttgaggtcaatggtagaaaaagaaatatcttcgtatgaaaactagacagaatgattgtcagaaactcctttgttatgtgggcatttaactcacagagtttaaccgttcttttcatagagcagttaggaaacactctgtttgtaacgtctgcaagtggatattcagacatatttgaggccttctttggaaacgggatttcttcatattatgctacacagaagaattctcagtaacttccttgtgttgtgtgtattcaactcacagagttgaaggatcctttacacagagcagtcttgaaatactctttttgtggaatttacacgtggagatttctgccgctttgatgtcaatggtagaataggaaatatcttcgtatagaaactagacagaatgattctcagaaactcctttgtgatgtgtgcgttcaactcacagtgtttaacctttcttttcatagagcagttaggaaacactctgtttgtaaagtctgaaagtggatattcagacctctttgaggccttcgttggaaacgggtttttttcatataaggctagacagaagaattctcagtaacttccttgtgttgtgtgtattcaaatgacagagttgaactttcatttagagagagcagatttgaaacactgtttttgtggaatttgcaagtggagatttcaagcgctttggggccaaaggcagaaaaggaaatatcttcgtataaaaactagacagaatcattctcagaaactcctgcgtgatgtgtgcgtccaactctcagagtttaacttttcttttcattcagcggtttggaaacactctgtttgtaaagtctgcacgtggatattttgaccacttagaggccttcgttggaaacgggtttttttcatgtaaggctagacagaagaattcccagtaacttcccttgtgttgggtgcattaaactcacagagttgaacgttcccttagacagagcagatttgaaacactctatttgtgcaatttgcaagtgtagatttcaagcgctttaaggtcaatggcagaaaaggaaatatcttcgtttcaaaactagacagaatcattcccacaaactgcgttgtgatgtgttcgttcaactcacacagtttaacctttctgttcatagagcagttaggaaacactctgtttgtaaagtctgtaagtggatattctgacatcttgtggccttcgttggaaacgggatttcttcatattctgctagacagaacaattctcagtaacttccttgtgttgtgtgtattcaacttacagagttgaacgattctttacacagagcagacttgaaacactctttttgtggaatttgcaagtggagatttcagccgctttgaggtcaatggtagaaaaggaaatatcttcgtataaagactagacagaatgattctcagaaactcctttgtgatgtgtgcgttcaactcacagagtttaacctttcttttcatagagcagttgggaaacactctgtttgtaaagtctgcaagtggatattcagacctccttgaggccttcgttggaaatgggatttcttcatattatgctagacagaagaattctcagtaacttccttgtgttgtgtgtattcaactgacagagttgaactttcatttagagagagcagatttgaaacactgtttttgtggaatttgcaagtggagatttcaagagctttggggccaaaggcagaaaaggaaatgtcttcgtataaaaactagacagaatcattctcagaaactgctctgcgatgtgtgcgttcaactctcagagtttaaattttcttttcattcagcagtttggaaacactctgtttgtaaagtctgcacgtggatattttgaccacttagaggccttcgttggaaacgggtttttttcctgtaaggctagacagaagaattcccagtaacttccttgtgttttgtacattcaacccacagagttgaacgtttccttagacagagcagatttgaaacactttttgtgcaattggcaagtggtgatttcagccgctttgaggtcaaaggtagaaaaggaaatatcttcctataaaaactagacagaatcattcccacaaactgcgttgtgatgtgttcgttcaactcacagagtttaacctttcttttcatagagcagttaggaaacactctgtttgtaaactctgcaagtggatattcagacctctttgaggccttcgttggaaacgggatttctccatactgtgctagacagaagaattctcagtaacttccttgtgttgtgtgtattcaactcacagagttgaacgatcctttacacagagcagacttgtaacactctttttgtggaatttgcaagtggagatttcagccgctttgaagtcaaaggtagaaaaggaaatatcttcctataaaacctagacagaatgattctcataaactcctttgtgatgtgtgcattcaactcacagagtttcacctttcttttcatagagcagttaggaaacactctgtttgtaaagtctgcaagtggatattcagacctccttgaggccttcgttggaaacgggatttcttcttattctgctagacagaagaattccccagtaacttccttgtgttgtgtgtgttcaactcacagagttgaactttcatttacacagagcagatttgaaacactctttttgtggaatttgcaggtggagatttcaagcgctttgaggccaaaggcagaaaaggaaatatcttcgtataaaaactagacagaatcattctcagaaactgctgcgtgatgtgtgcgttcaactctcagagtttaacttttcttttcattcagcggtttggaaacactctgtttgtaaagtgtgcacgtggaaattttgaccacttagaggccttcgttggaaacgggtttttttcatgtaaggctagacagaagaattcccagtaacttcccttgtgttgtgtacattcaactcacagagttgaacgttcccttagacagagcagatttgaaacactctttttgtgcaattggcaagtggagatttcaagcgctttgaggtcaatggcagaaaaggaaatatcttcgtttcaaaactagacagaatcattcccacaaactgcgttgtgatgtgttcgttcaactcacagagtttaacttttctgttcatagagcagttagaaaacactctgtttgtaaagtctgcaagtggatattcagacctccttgaggccttcgttggaaacgggatttcttcatattctgctagacagaagaattctcagtaacttccttgtgtggtgtgtattcaactcacagagttgaacgatcctttacagagagcagacttgaaacactctttttgtgaaatttgcaagtggagatttcagccgctttgaggtcaatggtagaataggaaatatcttcctatagaaactagacagaatgattctcagaaactcctttgtgatgtgtgtgttcaactcacagagtttaacctttcttttcatagaacagttcgtaaacactctgtttataaagtctgcaagtggatattcagacccctttgaggccttcgttggaaacgggatttcttcatattatgctagacagaagaattctcagtaactttccttgtgttgtgtgtattcaactgacagagttgaactttcatttagagagagcagatttgaaacactgtttttgtggaatttgcaagtggagatttcaagcgctttggggccaagggcagaaaaggaaatatcttcgtataaaaactagacagaatcattctcagaaactgctctgcgatttgtgcgttcaactctcagagtttaactttccttttcattcagcagtttggaaacactctgtttgtaaagtctgcacgtggataatttgaccacttagaggccttcgttggaaacgggtttttttcatgtaaggctagacagaagaattctcagtaacttctttgtgttgtgtgtattcaactcacagagttgaacgatcctttacacagagcagacttgtaacactctttttgtggaatttgcaagtggagatttcagccgctttgaagtcaaaagtagaaaaggaaatatcttcctataaaaactagacagaatcattcccacaaactgcgttgtgatgtgttcgttcaactcacagagtttaacttttctgttcatagagcagttagaaaacactctgtttgtaaagtctgcaagtggatattcagacctccttgaggccttcgttggaaacgggatttcttcatattctgctagacagaagaattctcagtaacttccttgtgttgtgtgtattcaactcacagagttgaacgatcctttacacagagcagacttgaaacactctttttgtggaatttgcaagtggagatttcagccgctttgaggtcaatagtagaaaaggaaacatcttcgtagaaaaactagacagaatgattctgagaaatcctttgtgatgtgtgcgttcaactcacagagtttaacctttcttttcatagagcagttaggaaacactctgtttttaaagtcttcaagtggatattcagacctccttgaggccttcgttggaaacgggatttcttcatattatgctagacagaagaattcccagtaacttccttgtgttgtgtgtgttcaactcacagagttgaactttcatttacacagagcagatttgaaacactctttttgtggaatttgcaagtggagatttcaagcgctttgaggctaaaggcagaaaaggaaatatcttcgtataaaaactaggcagaatcattctcagaaactgctctgcgatgtgtgcgttcaactctcagagtttaacttttcttttcattcagcaatttggaaacactctgtttgtaaagtctgcacgtggatattttgaccacttagaggccttcgttggaaacgggtttctttcctgtaaggctagacagaagaattcccagtaacttccttgcgttgtgtacattcaactcacagagttgaacgttcccttagacagagcagatttgaaacactctttttgtgcaattggcaagtggagatttcaagcgctttaaggtcaatggcagaaaaggaaatatcttcgtttcaaaactagacagaatgattctcagaaactcctttgtgatgtgtgcgttcaactcacggagtttaacctttcttttcatagagcagttaggaaacactctgtttgtaaagtctggaagtggatattcagacatctttgaggctttcgttggaaacgggatttcttcatattctgctatacagaagaattgtcagaaacttccttgtgttgtgtgtcttcaactcacagagttgaacgatgctttacacagagtagacttgaaacactctttttctggaatttgcaagtggagatttcagccgctttgaggtcaatggtagaaaaggaaatatcttcgtataaaaactagacagaatgtttctcagaaactcctttgtgatgtgggcgttgaactcacagagtttaacctttcttttcatagagcagttaggaaacactctgtttgtaacgtctgcaggtggatatttggacttctttgaggtcttcgttggaaacgggtttttttcatgtaaggctagacagaagaattcccagtaacttcccttgtgttgtgtgtgttcaactcacagagttgaactttcatttacacagagcagatttgaaacactctttttgtggaatttgcaagtggagatttcaagcgctttgaggccaaaggcagaaaaggaaatatcttcgtataaaaactagacagaatcattctcagaaactcctttgtgatgtgtgcgttcaactctcagagtttaacttttcttttcattcagcggtttggaaacactctgtttgtaaagtctgcacgtggatattttgaccacttagaggccttcgttggaaacgggtttttttcatgtaaggctagacagaagaattctcagtaactttccttgtgttgtgtgtattcaactcacagagttgaacgatcctttacacagagcagacttgtaacactctttttgtggaatttgcaagtggagatttcagccgctttgaagtcaaaggtagaaaaggaaatatctccctataaaaactagacagaatgattctcagaaacttcttggtgatgtgtgcgttcaactcacagagtttaacctttcttttcatagagcagttaggaaacactctgtttgtaaactctgcaagtggatattcagacctccttgaggccttcgttggaaacgggatttcttcatactgtgctagacagaagaattctcagtaacttccttgtgttgtgtgtattcaactcacagagttgaatgatcctttacacagagcagacttgaaacactctttttgtggaatttgcaagtggagatttcagccgcgttgaggtcaatggtagaagaggaaatatcttcgtataaaaactagacagaatgattctcagaaactcctttgtgatgtgtgcgttcaactcacagagtttaacttttcttttcatagagcagttaggaaacattctgtttgtaaagtctgcaagtggatattcagacctctttgaggccttctttggaaacgggatttcttcatattatgctagacagaagaattctcagtaacttccttgtgttgtgtgtattcaactgacagagttgaactttcatttagagagagcagatttgaaacactgtttttgtggaatttgcaagtggagatttcaagggctttggggccaagggcagaaaaggaaatatcttcgtataaaaactagacagaatcattctcagaaactgatgcgtgatgtgtgcgttcaactctcagagtttaacttttcttttcattcagcggtttggaaacactctgtctgtaaagtctgcacgtggatattttgaccacttagaggccttcgttggaaacgggtttttttcatgtaaggctagacagaagaattcccagtaacttccttgtgttgtgtacattcaactcacagagttgaactttcccttagacagagcagacttgtaacactctttttgtggaatttgcaagtggagatttcagccgctttgaagtcaaaggtagaaaaggaaatatcttcctataaaaactagacagaatgattctcagaaactcctttgtgatgtgtgcgttcaactcacagagtttaacctttcttttcatagagcagttaggaaacactctgtttgtaaagtctgcaaggggataatcagacctctttgaggccttcgttggaaacgggatttcttcgtattctgctagacagaagaattctcagtaacttcctcgtgttgtgtgtattcaactcacagacttgaacgatcctttacacagagcagacttgaaacactctttttgtggaatttgcaaatggagatttcagccgctttaagatcaatggttgaaaaggaaatatcttcatataaaaattagacagaatgattctcagaaactcctttgtgatgtgtgtgttcaactcacagagtttcacctttcttttcatagagcagttaggaaacactctgtttgtaaagtctgcaagtggacattcagacctccttgaggccttcgttggaaacgggatttcttcatattctgctagacagaagaattctcaataacttccttgtgttgtgtgtattcaactcacagagttgaacgatcctttacacagagcagacttgaaacactctttttgtggaatttgcaagtggagatttcagccgctttgagttcaatggtagaataggaaatatcttcctatagaaactagacagaatgattctcagaaacttctttgtgatgtgtgcgttcaactcacagagttaaaactttcttttcatagagcagttaggaaacactctgtttgtaaagactgcacgtggatattcagacctctttgaggccttcgttggaaacgggtttttttcctgtaaggctagacagaagaattctcagtaacttccttgtgttgtgtgtattcaactgacagagttgaactttcatttagagagagcagatttgaaacactgtttttgtggaatttgcacttggagatttcatgcgctttggggccaatggcagaaaaggaaatatcttcgtataaaaactagacagaatcattctcagaaactgctgcgtgatgtgtgcgttcaactctcagagtttaacttttcttttcattcagcggtttggaaacactctgtttgtaaagtctgcacgtggatattttgaccacttagaggccttcgttggaaacgggtttttttcatgtaagggtagacagaagaattcccagtaacttccttttgttgtgtgcattcaactcacagagatgaacgttcgcttagacagagcagatttgaaacactctatttgtgcaatttgcaagtgtagatttcaagcgctttaaggtcaatggcagaaaaggaaatatcttcgtttcaaaactagacagaatcattcccacaaactgcgttgtgatgtgttcgttcaactcacagggtttaacctttctgttcatagagcagttaggaaacactctgtttgtaaagtctgtaagtggatattctgacatcttgtggccttcgttggaaacgggatttcttcatattctgctagacagaagaattctcagtaacttccttgtgttgtgtgtattcaactcacagagttcaatgatcatttacacagagcagacttgaaacactctttttgtggaatttgcaaggggagatttcagccgctttgaggtcaatggtagaaaaggaaatatcttcgtataaaaactagacagaatgattctcagaaaatcttttgtgatgtgtgcgttcaactcacagagtttaacttttcttcttatagagcagttaggaaacactctgtttgtaaagtctgcaagtggatattcagacctctttgaggccttcgttggaaacgggatttcttcatattatgctagacagaataattctcagtaacttccttgtgttgtgtgtattcaactcacagagttgaaggatcctttacagagagcaggcttgaaacactctttttgtcgaatttgcaagtggagatttctgccgctttgaggtcaatggtagaataggaaatatcttcttatagaaactagacagaatcattctcagaaactgctctgcgatgtgtgcgttcaactctcagagtttaacttttcttttcattcagcagtttggaaacactctgtttgtaaagtctgcacgtggatattttgaccacttagaggccttcgttgcaaacgtgtttttttcctgtaaggctagacagaagaattcccagtaacttccttgtgttgtgtacattcaactcacagagttgaacgttcccttagacagagcagatttgaaacactctttttgtgcaattggcaagtggagatttcaagcgctttaaggtcaaaggcagaaaaggaaatatcttcgtttcaaaactagacagaatgattctcagaaactcctttgtgatgtgtgcgttcaactcacacagtttaacctttcttttcatagagcagttaggaaacactgtttgtaaagtctgcaagtggatattcagacctccttgaggccttcgttggaaacgggatttcttcatattctgctagacagaagaattctcagtaacttccttgtgttctgtgtattcaactcacagagttgaacgatcctttacacagagcagacttgaaacagtctttttgtggaatttgcaagtggagacttcagccgctttgaggtcaatggtagaataggtaatatcttcctatagaaactagacagaatgattctcagaaactcctttgtgatgtgtgcgttcaactcacagagtttaacttttcttttcatagagcagttaggaaacactctgtttgtaaagtctgcaagtggatattcagacctctttgaggccttcgttggaaacgggatttcttcatattctgctagacagaataattctcagtaacttccttgtgttgtgtgtattcaactcacagagttgaacgatcctttacacagagcagacttgaaacattctttttgtggaatttgcaagtggagatttctgccgctttgaggtcaatggtagaataggaaatatcttcctatagaaactagacagaatgattctcagaaactcctttgtgatgtgtgcgttcaactcacagagtttaacctttcttttcattcaccagtttgggaaacactctgtttgtaaagtctgcacgtggatattttgaccacttagaggccttcgttggaaacgggtttttttcctgtaaggctagacagaagaattcccagtaacttccttgtgttgtgtgcattcaactcacagagttgaacgttcccttagacagagcagatttgaaacactctatttgtgtaatttgcaagtgtagatttcaagcgctttaaggtcaacggcagaaaaggatatatcttcgtttcaaaactagacagaatcattcccacaaactcgttgtgatgtgttcgttcaactcacagagtttaacctttctgttcatagagcagttaggaaacactctgtttgtaaagtctgcaagtggatattcagacctccttgaggccttcgttggaaacgggatttcttcatattctgctagacagaagaattctcagaaacttccttgtgttgtgtgtattcaactcacagatgtgaacgatcgtttacacagagcagacttgagacactctttttgtggaatttgtaagtggagatttcagccgctttgaggtcaatggtagaaaaggaaatatcttcatataaaaactagacagaacgattctcagaaactcctttgtgatgtgtgcgttcaactcacagagtttaacctttctgttcatagagcagttaggaaacactctgtttgtaaagtctgcaagtggatattcagacctccttgaggccttcgttggaaacgggatttcttcatattctgctagacagaagaattcccactaacttccttgtgttgtgtgtgttcaactcacagagttgaactttcatttacacagagcagatttgaaacactcattttgtggaatttgcaagtggagatttcaagcgctttgaggccaaaggcagaaaaggaaatatcttcgtataaaaactagacagaatcattctcagaaactgctctgcgatgtgtgcgttcaactctcagagtttaacttttcttttcattcagcagtttggaaacactctgtttgtgaagtctgcacgtggatattttgaccacttagaggccttcgttggaaacgggtttttttcctgtaacgctagacagaagaattcccagtaacttccttgtgttgtgtgcattcaactcacagagttgaacgttcccttagacagagcagatttgaaacactctatttgtccaatttgcaagtgtagatttcaagcgctttaaggtcaacggcagaaaaggaaatatcttcgtttcaaaactagacagaatgattctcagaaacttcattgtgatgtgtgtgtgcaactcacagagtttaacctttcttttcatagagcagttgggaaacagtctgtttgtaaattctgtaagtggatattctgacatcttgtggccttcgttggaaacgggatttcttcatattctgctagacagaagaattctcagtaacctccttgtgttgtgtgtattcaactcacagagttgaacgatcctttacacagagcagacttgaaacactcttttcgtggaatttgcaagtggagatttcagccgctttgagatcaatggtagaaaaggaaatatcttcgtataaaaactagacagaatgattctcataaactcatttgtgatgggtgcgttcaactcacaaagtttaacttttcttttcatagagcagttaggaaacactctgtttgtaaagtctgcaagtggatattcagacctctttgaggccttcgttggaaacgggatttcttcatattatgctagacagaataattctcagtaacttccttgtgttgtgtgtattcaactcacagagttgaacgatcctttacacagagcagacttgaaacattctttttgtggaatttgcaactggagatttcagccgctttgaggtcaatggtagaataggaaatatcttcctacagaaactagacagaatcattctcagaaactgctgcgtgatgtgtgcgttcaactctcagagtttaacttttcttttcattcagcggattggaaacactctgtttgtaaagtctgcacgtggatattttgaccacttagaggccttcgttggaaacgggtttttttcatgtaaggctagacagaagcattcccagtaacttccttgtgttgtgtgcattcaactcacagagatgaacgttcccttagacagagcagatttgaaacactctatttgtgcaatttgcaagtgtagatttcaagcgctttaaggtcaacggcagaaaaggaaatatcttcgtttcaaaactagacagaatcattcccacaaactgcgttgtgatgtgttcgttcaactcacagagtttaacctttctgttcatagagcagttaggaaacactctgtttgtaaagtctgtaagtggatattcggacatcttgtggccttcgttggaaacgggatttcttcatattctgctagacagaagaattctcagtaacttccttgtgttgtgtgtattcaactcacagagttgaacgatcctttacacagagcagacttgaaacattctttttgtggaatttgcaagtggagatttcagccgctttgaggtcaatagtagaaaaggaaatatcttcgtagaaaaactaggcagaatgattctcagaaactcctttgtgatgtgtgcgttcaactcacagagtttaacctttcttttcatagagcagttaggaaacactctgtttgtaaagtctggaagtggatattcagacctccttgaggccttcgttggaaacgggatttcttcatattatgctagacagaagaattctcagtaacttccttgtgttgtgtgtattcaactcacagagttgaactttcatttagagagagcagatttgaaacactgtttttgtggaatttgcaagtggagatttcaagcgctttggggccaaaggcagaaaaggaaatatcttcgtataaaaactagacagaatcattctcagaaactgctgcgtgatgtgtgcgttcaactctcagagtttaacttttcttttcattcagcggtttggaaacactctctttgtaaagtctgcacgtggaaattttgaccacttagaggccttcgttggaaacgggtttttttcatgtaaggctagacagaagaattcccagtaacttccttgtgttgtgtacattcaactcacagagttgaacgttcccttagaccgagcagatttgaaacactctttttgtgcaattggcaagtggagatttcaaccgctttaaggtcaatggcagaaaaggaaatatcttcgtttcaaaactagacagaatcattcccacaaactgcgttgtgatgtgttcgttcatctcacagagtttaacctatcttttcatagagcagttaggaaacactctgtttgtaaattctgtaagtggatattctgacatcttgtggccttcgttggaaacgggatttcttcatattctgctagacagaggaattctcagtaacttccttgtgttgtgtgtattcaactcacagagttgaacgatcctttaaacagagcagacttgaaacactctttttgtggaatttgcaagtggagatttcagccgctttgagttcaatggtagaataggaaatatcttcctatagaaactacacagaatgattctcagaaaatcctgtgtgatgtgtgcgttcaactcacagagtttaacttttcttttcatagagcagttaggaaacactctgtttgtaaagtctgcaagtggatattcagacgtctttgaggccttcgttggaaacgggatttcttcatattctgccagacagaataattctcagtaacttccttgtgttgtgtgtattcaactcacagagttgaaggatcctttacagcgagcaggcttgaaacactctttttgtcgaatttgcaagtggagatttcagccgctttgaggtcaatggtagaataggaaatatcttcttatagaaactagacaaaatcattctcagaaactgctcggtgatgtgtgcgttcaactctcagagtttaacttttcttttcattcagcagtttggaaacactatgtttgtaaagtctgcacgtggatattttgacctctgagaggccttcgttggaaacgggtttttttcatgtaaggctagacagaagaattctcagtaacttccttgtgttgtgtgtattcaactcacagagttgaacgatcctttacacagagcagacttgtaacactctttttgtggaatgtgcaagtggagatttcagccgctttgaagtcaaaggtagaaaaggaaatatcttcctataaaaactagacagaatgattctcagaaactcctttgtgatgtgtgtgttcaactcacagagtttaacctttcttttcatagagcagttagtaaacactctgtttataaagtctgcaagtggatattcagaccccttgaggccttcgttggaaacgggatttcttcacattgtgctagacagagaattctcagtaacttccttgtgttgtgtgtattcaactcacagagttgaacgatcctttacacagagcagacttgaaacactctttttgtggaatttgcaagtggagatttcagccgctttgaggtcaatagtagaaaaggaaatatcttcgtagaaaaactaggcagaatgattctcagaaactcctttgtgatgtttgtgttcaactcacagagtttaacctttcttttcatagagcagttagtaaacactctgtttataaagtctgcaagtggatattcagtcccctttgaggccttcgttggaaacgggatttcttcatattatgctagacagaagaattctcagtaacttccttgtgttgtgtgtattcaactcacagagttgaactttcatttagagagagcagatttgaaacactgtttctgtggaatttccaagtggagatttcaagcgctttggggccaaaggcagaaaaggaaatatcttcgtataaaaactagacagaatcattctcagaaactgctgcgtgatgtgtacgtttaactctcagagtttaacttttcttttcattcagcggtttggaaacactctgtttgtaaagtctgcacgtggatattttgaccacttagaggccttcgttggaaacgggtttttttcatctaaggttagacagaagaattcccagtaacttccttgtgttgtgtacattcaactcacagagttgaacgttcccttagacagagcagatttgaaacactctttttgtgcaattggcaaatggagatttcaagcgctttaagttcaatggcagaaaaggaaatatcttcgtttcaaaactagacagaatcattcccacaaactgccttgtgatgtgttcgttcaactcacagagtttaacctttctgttcatagagcagttaggaaacactctgtaacgtctgtaagtggatattctgacatcttgtggccttcgttggaaacgggatttcttcatattctgctagacagaagaattctcagaatcttccttgtgttgtgtgtattcaactcacacagttgaacgatggtttacacagagcagatatgaaacactctttttgtggaatttgcaagtggagatttcagccgctttgaggtcaatggtagaaaaggaaatatattcgtataaaaactagacagaatgattctcagaaacttctttgtgatgtgtgcgttcaactcacagagtttaacctttcttttcatagagcagttaggaaacactctgtttgtaaactctgcaagtggatattcagacctctgtgaggccttcgttggaaacgggatttcttcatactgtgctagacagaagaattcccagtaacttccttgtgttgtgtgtgttcaactcacagagttgaacttccatttacacagagcagatttgaaacactctttttgtggaatttgcaagtggagatttcaagcgctttgaggccaaaggcagaaaaggaaatatcttcatttcaaaactagacagaatcattctcagaaactgctgcgtgatgtgtgcgttcaactctcagagtttaactttttttttcattcagcggtttggaaacactctgtttgtaaagtctgcacgtggatattttgaccacttagaggccttcgttggaaacgggtttttttcatgtaaggctagacagaagaattcccagtaacttcccttgtgttgtgtgcattcaactcacagagttgaacgttcacttagacagagcagatttgaaacactctatttgtgcaatttgcaagtgtagatttcaagcgctttaaggtcaatggcagaaaaggaaatttcttcgtttcaaaactagacagaatcattcccacaaactgcgttgtgatgtgttcgttcaactcacagagtttaacctttctgttcatagagcagttaggaaacactctgtttgtaaagtctgtaagtgaatattctgacatcttgtggccttcgttggaaacgggatttcttcatattctgctagacagaagaattctcagtaacttccttgtgttgtgtgtattcaactcacagaagttgaacgatcctttacacagagcagacttgaaacactctttttgtggaatttgcaagtggagatttcagccgctttgaggtcaatggtagaaaaggaaatatcttcgtataaagactagacagagtgattctcagaaactcctttgtgatgtgtgcgttcaactcacagagtttaacctttcttttcatagagcagttaggaaacactctgtttgtaaagtctgcaagtggatattcagacctccttgaggtcttcgttggaaacgggatttcttcatattatgctagacagaagaattctcagtaacttccttggtgttgtgtgtattcaaatgacagagttgaactttcatttagagagagcagatttgaaacactgtttttgtggaatttgcaagtggagatttcaagcgctttggggccaaaggcagaaaaggaaatatcttcgtataaaaactagacagaatcattctcagaaactgctctgcgatgtgtgcgttcaactctcagagtttaacttttcttttcattcagcagtttggaaacactctgtttgtaaagtctgcacgtggatattttgaccacttagaggccttcgttggaaacgggttttttttctgtaaggctagacagaagaattcccagtaacttccttgtgttgtgtacattcaactcacagagttgaacgttccgttagacagagcagatttgaaacactctttttgtgcaattggcaaatggagatttcaagcgctttaagttcaatggcagaaaaggaaatatcttcgtttcaaaactagacagaatcattcccacaaactgcgttgtgatgtgttcgttcaacccacagagtttaacctttcttttcatagagcagttaggaaacactctgtttgtaaagtatgaaagtggatattctgacatcttgtggccttcgttggaaacgggatttcttcatattctgctagacagaagaattctcagtaacttccttgtgttgtgtgtattcaactcacagagttgaacgatcctttacacagagcagacttgaaacattctttttatggaatttgcaagtggagatttcagccgctttgaggtcaatggtagaataggaaatatcttcctatacaaactagacagaatgattctcagaaactcctttctgatgtgtgcgttcaactcacagagtttaacatttcttttcatagagcagttaggaaacactctgtttgtaaagtctgcaagtggatattcagacctctttgaggccttcgttggaaacgggatttcttcatattctgctagacagaagaattcccactaacttccttgtgttgtgtgtgttcaactcacagagttgaactttcatttacacagagcagatttgaaacactctttttgtggaatttgaaagtggagatttcaagcgctttgaggccaaaggcagaaaaggaaatatcttcgtttcaaaactagacagaatcattctcagaaactgctctgcgatgtgtgcgttcaactctcagagtttaacttttcttttcattcagcagtttggaaacactctgtttgtaaagtctgcacgtggataatttgaccacttagaggccttcgttggaaacgagtttttttcatgtaaggctagacagaagaattcccagtaacttccttgtgttgtgtgcattcaactcacagagttgaacgttcccttagacagagcagatttgaaacactctatttgtccaatttgcaagtgtagatttcaagcgctttaaggtcaacggcagaaaaggaaatatcttcgtttcaaaactagacagaatcattcccacaaactgcgttgtgatgtgttcgttcaactcacagagtttaacctttcttttcatagagcagttaggaaacagtctgtttgtcaattctgtaagtggatattctgacatcttgtggccttcgttggaaacgggatttcttcatattctcctagacagaagaattgtcagtaacttccttgtgttgtgtgtattcaactcacagagttgaacgatcctttacacagagcagacgtaaagcactctttttgtggaattggcaagtggagatttcagccgctttgaggtcaatggtagaaaaggaaatatcttcgtataaaaactagacagaatgattctcagaaactcctttgtgatgtgtgcgttcaactcacagagtttaacctttcttttcatagagcagttaggaaacactctgtttgtaaagtctgcaagtggatattcagacatctttcaggcgttcattggaaacgggatttcttcatattatgctagacagaagaattcccagtaacttccttgtgttgtgtgtgttcaactcacagagttgaactttcatttacacagagcagatttgaaacactctttttgtggaatttacaggtggagatttcaagcgctttgaggccaaaggcagaaaaggaaatatcttcgtataaaaactagacagaatcattctcagaaactgctctgcgatgtgtgcgttcaactctcagagtttaacttttcttttcattcagcagtttggaaacactctgtttgtaacgtctgcacgtggataatttgaccacttagaggccttcgttggaaacgggtttttttcatgtaaggctagacagaagaattcccaggaacttccttgtgttgtgtacattcaactcacagagttgaacgttcccttagacagagcagatttgaaacagtctttttgtgcaattggcaagtggtgatttcagccgctttgaggtcaatggtagaaaaggaaatatcttcgtataaaaactagacagaatgattctcataaactcctttgtgatgtatgcgttcaactcacagagtttaacctttcttttcatagagcagttaggaaacactctgtttgtaaagtctgcaagtggatattcagacctccttgaggccttcgttggaaacgggatttcttcatattctgctagaaagaagaattctcagtaacttccttgtgttgtgtgtattcaactcacagagttgaacgatcctttacacagagcagacttgaaacactctttatgtggaatttgcttgtggagatttcagctgctttgaggtcaatggtagaaaaggaaatatcttcgtataaagagtagacagaacgattctcagaaactcctttgtgatgtgtgcgttcaactcacagagtttaacttttcttttcatagagccgttaggaaacactctgtttgtaaagtctgcaagtggatattcagacctctttgaggccttcgttggaaacgggatttcttcctattctgctagacagaagaattctcagtaacttccttgtgttgtgtgtattcaactcacagagttgaacgatcctttacacagagcagacttgaaacactctttttgtggaatttgcaagtggagatttcagccgctttgaggtcaatggtagaaaaggaaatatcttcgtataaaagactagacagaatcattctcagaaactgctctgcgatgtgtgcgttcaactctcagagtttaacttttcttttcattcagcagtttggaaacactctgtttgtaaagtctgcacgtggatattttgaccccttagaggccttcgttggaaacgggtttttttcctgtaaggctagacagaagaattcccaggaacttccttgtgttgtgtgcattcaactcacaaagttgaacgttcccttagacagagcagatttgaaacactctatttgtgcaatttgcaagtgtagttttcaagctctttaaggtcaacggcagaaaaggaaatatcttcgtttcagaactagacagaatcattcccacaaactgcgttgtgatgtgttcgttcaactcacagagtttaacctttcttttcatagagcagttaggaaacactctgttgtaaattctgtaagtggatattctgacatcttggggccttcgttggaaacgggatttcttcatattctgctagacagaagaattctcagtaacttccttgtgttgtgtgtattcaactcacagagttgaacgatcctttacacagagcaaacttgaaacactctttttgtggaatttgcaagtggagatttcagccgctttgaggtcaatggtagaaaaggaaatatcttcgtataaagactagacagaatgattctcagaaactcctttgtgatgtgtgcgttcaactcacagagtttaacctttcttttcatagagcagttaggaaacactctgtttgtaaagtctgcaagtggatattcagacctctttgaggccttcgttggaaacgggttttttttcatataaggctagacagaagaattcccagtaacttccttgtgttgtgtgtgttcaactcacagagttgaactttcatttacacagagcagatttgaaacactctttttgtggaatttgcaagtggagatttcaagcggtttgaggccaaaggcagaaaaggaaatatcttcgtttgaaaactagacagaatgattctcataaactcctttgtgatgtgtgcgttcaactcacagagtttaacctttcttttcatagagcagttaggaaacactctgtttgtaaagtctgcaagtggatattcagacctgtttgaggccttcgttggaaacgggatttcttcatattctgctagacagaagaattctcagtaacttccttgtgttgtgtgtattcaactcacagagttgaacgatcctttacacagagcagacttgaaacactctttttgtggaatttgcaagtgtagatttcaagcgctttaaggtcaatggcagaaaaggaaatatcatcgtttcaaaactagacagaatcattcccacaaactgcgttgtgatgtgttcgttcaactcacagagtttaaactttctgttcatagagcagttaggaaacactgtgtttgtaaagtctgcaagtggatattcagacctctttgaggccatcgttggaaacgggatttcttcatattctgctagacagaagaattctcagaaacttccttgtgttgtgtgttttcaactcacagagttcaacgatcctttacacagagcagacttgaaacactctttttgtggaatttgcaagtggagatttcagcctctttgagatcaatggtagaataggaaatatcttcctatagaaactagacagaatgattctcagaaactcctttgtgatgtgtgcgttcaactcacacagtttaacctttcttttcatagagcagttaggaaacactctgtttgtaaagtctgcaagtggatattcagacctccttgaggcattcgttggaaacgggatttcttcatattatgctagacagaagaattctcagtaacttccttgtgttgtgtgtattcaaatcacagagttgaacgatcctttacacagagcagacttgaaacactctttttgtggaatttgcaagtggagatttcagccgctttgaggtcaatgttagaataggaaatatcttcctatagaaactagacagaatgattctcagaaaatcttttgtgatgtgtgcgttcaactcacaggagtttaacttttcttctcatagagcagttaggaaacactctgtttgtaaagtctgccagtggatattcagacctctttgaggtcttcgttggaaacgggatttcttcatattatgctagacagaagaattcccagtaacttccttgtgttgtgtacattcaactcacagagttgaacgttcccttagacagagcagatttgaaacactctttttgtgcaattggcaaatggagatttcaagcgctttaagttcaatggcagaaaaggaaatatcttcgtttcaaaactagacagaatgattctcagaaacttctttgtgatgtgtgcgttcaactcacagagtttaacctttcttttcatagagcagttaggaaacactctgtttgtaaactctgcaagtggatattcagacctctttgtggccttcgttggaaacgggatttcttcatactatgctagacagaagaattctcagtaacttccttgtgttgtgtgtattcaactcacagagttgaacgatcctttacacagagcagacttgtaacactctttttgtggaatttgcaagtggagatttcagccgctttgaagtcaaaggtagaaaaggaaatatcttcgtataaaaactagacagaatgattctcagaaacttccttgtgatgtgtgcgttcaactcacagagtttaacctttcttttcatagagcagttaggaaacactctgtttgtaaactctgcaagtggatattcagacctctttgaggccttcgttggaaacgggatttcttcatactatgctagacagaagaattctcagtaacttaccttgtgttgtgtgtattcaactgacagagttgaactttcatttacacagagcagatttgaaacactctttttgtggaatttgcaaatggagatttcaagcgctttgaggccaaaggcagaaaaggaaatatcttcgtataaaaactagacagaatcattctcagaaactgctctgcgatgtgtgcgttcaactctcagagtttaacttttcttttccttcagcagtttggaaacactctgtttgtaaagtctgcacgtggataatttgaccacttagaggccttcgttggaaacgggtttttttcatgtaaggtctagacagaagaattcccagtaacttccttgtgttgtgtgcattcaactcacagagttgaacgttcccttagacagagcagatttgaaacactctatttgtgcaattggcaagtgtagatttcaagcgctttaaggtcaatggcagaaaaggaaatatcttcgtttcaaaactagacagaatgattctaagaaaatcttttgtgatgtgtgcgttcaactcacagagtttaacttttcttctcatagagcagttaggaaacactctgtttgtaaagtctgcaagtggatattcagacctctttgaggccttcgttggaaacgggatttcttcatattatgctagacagaataattctcagtaacttccttgtgttgtgtgtattcaactcacagagttgaaggatcctttacagagagcaggcttgaaagactctttttgtcgaatttgcaagtggagatttcagccgctttgaggtcaatggtagaataggaaatatcttcttatacaaactagacagaatgattctgagaaactcctttgtgatgtgtgcgttcatctcacagagtttaacctttcttttcatagagcagttaggaaacactctgtttgtaaagtctgcaagtggatattcagacctccttgaggccttctttggaaacgggatttcttcatattatgctagacacaagtattcccagtaacttccttgtgttgtgtgtgttcaactcacacagttgaactttgatttacacagagcagatttgaaacactctttttgtggaatttgcaagtggagatttcaagcgctttgaggccaaaggcagaaaaggaaatatcttcgtataaaaactagacagaatcattctcagaaactgctctgcgatgtgtgcgttcaactcttagagtttaacttttcttttcattcagcagtttggaaacactctgtttgtaaagtctgcacgtggatattttgaccacttagaggccttcgttggaaacgggtttttttcctgtaaggctagacagaagatttcccagtaaattccttgtgttgtgtacattcaactcacagagttgaacgttcccttagacagagcagatttgaaacactctttttgtgcaattggcaagtggagatttcaagcgctttaaggtcaatggcagaaaaggaaatatcttcgtttcaaaactagacagaatcattcccacaaactgcgttgtgatgtattcgttcaactcacagagtttaacctttcttttcatagagcagttaggaaacagtctgtttgtaaattctgtaagtggatattctgacatcttgtggccttcgttggaaacgggatttcttcacattctgctagacagaagaattctcagtaacttccttgtgttgtgtgtattcaactcacagaattgaatgatcctttacacagaacagtcttgaaacactctttttgtggaatttgcaagtggagatttcagccgctttgaggtcaatggtagaataggaaatatcttcctatagaaactagacagaatgattctcagaaactcctttgtgatgtgtgcgttcaactcacagagttcaacctttcttttcatagagcagttaggaaacactctgtttgtaaagtctgcaagtggatattcagacatctttgaggctttcgttggaaacgggatttcttcatattctgctagacagaagaattcccagtaacttccttgtgttgtgtgtgtccaactcacagagttgaactttcatttacacagagcagatttgaaacactctttttgtggaacttgcaagtggagatttcaagcgctttgaggccaaaggcagaaaaggaaatatcttcatttcaaaactagacagaatcattctcagaaactgctctgcgatgtgtgcgttcaactctcagagtttaacttttcttttcattcagcagtttggaaacactctggttgtaaagtctgcacgtggatattttgaccacttagaggccttcgttggaaacgggtttttttcctgtaaggctagacagaagaattcccagtaacttccttgtgttgtgtgcattcaactcacagtgttgaacgttcccttagacagagcagatttgaaacactctatttgtgcaatttgcaagtgtagatttcaagcgctttaaggtcaatggcagaaaaggaaatatcttcgtttcaaaactagacagaatcattcccacaaactgcgttgtgatgtgttcgttcaactcacagagtttaacctttccgttcatagagcagttaggaaacacactgtttgtaaagtctgtaagtggatattctgacatcttgtggccttcgttggaaacgggatttcttcatattctgctagacagaagaattctcagtaacttccttgtgttgtgtgtattcaactcacagagttgaacgatcctttacacagagcagacttgtaacactctttttgtggaattcgcaagtggagatttcagccgctttgaagtcaaaggtagaaaaggaaatatcttcctataaaaactagacagaatgtttctcagaaacttctttgtgatgtgtgcgttcaactcacagagtttaacctttcttttcatagagcagttaggaaacactctgtttgtaaagtctgcaagtggatattcagacctctttgaggccttcgttggaaacgggatttcttcatactgtgctagacagaagaattctcagtaacttccttgtgttgtgtgtattcaactcacagagttgaacgatcctttacacagagcggactggaaacactctttttgtggaatttgcaagcggagatttcaggtgcgttgaggtcaatggtagaaaaggaaatatcttcgtataaaaactagacagaatcattctcagaaactgctctgcgatgtgtgcgttcaactctcagagtttaacttttcttttcattcagcagttcggaaacactctgtttgtaaagtctgcacgtggatattttgaccacttagatgccttctttggaaacgggtttttttcttgtaaggctagacagaagaattcccagtaacttccttgtgttgtgtgcattcaactcacagacttgaacgttcccttagacagagcagatttgaaacactctatttgtgcaatttgcaagtgtagatttcaagcgctttaaggtcaatggcagaaaaggaaatatcttcgtttcaaaactagacagaatcattcccacaaacagcgttgtgatgtgttcgctcaactcacagagtttaacctttcttttcatagagcagttaggaaacagtctgtttgtcaattctgtaagtggatattctgacatcttgtggcattcgttggaaacgggatttcttcatattctgctagacagaagaattctcagaatcttccttgtgttgtgtgtattcaactcacagagttgaacgatcctttacacagagcagacttgaaacactctttttgtggaatttgcaagtggagatttcagccgctttgaggaccatggtagaaaaggaaatatcttcgtataaaaactagacagaatgattctcagaaactcctttgtgatgtgtgctttcaacgcacagagtttaacctttcttttcatagagcagttaggaaacactctgttggtaaagtctgcaagtggatattcagacctccttgaggccttcgttggaaacgggatttcttcatattatgctagacagaagaattctcagtaactttccttgtgttgtgtgtattcaactgacagagttgaactatcatttagagagagcagatttgaaacactgtttttgtggaatttgcaagtggagatttcaagcgctttggggccaaaggcagaaaaggaaatatcttcgtataaaaactagacagaataattgtcagaaactgctgcgtgatgtgtgcgttcaactctcagagtttaacttttcttttcattcagcggtttggaaacactctgtttgtaaagtctgcacgtggaaattttgaccacttagaggccttcgttagaaacgggtttttttcatgtaaggctagacagaagaattcccagtaacttccttgtgttgtgtgcattcaactcacagagttgaacgttcccttagacagagcagatttgaaacactctatttgtgcaatttgcaagtgtagatttcaagcgctttaaggtcaatggcagaaaaggaaatatcttcgttttaaaactagacagaatgattctcagaaaatcctttgtgatgtgtgcgttcaactcacagagtttaacctttcttttcatagagcagttaggaaacactctgtttgtaaagtctgcaagtggatattcagacctctttgaggccttcgttggaaacgggatttcttcatattctgctagacagaagaattctcagtaacttccttgtgtagtgtatattcaactcacagagttgaacgatcctttacacagagcagacttgaaacactctttttgtggaatttgcaagtggagatttcagccgctttgaggtcaatagtagaaaaggaaatatcttcgtagaaaaactagacagaatgattctcagaaactgctttgtgatgtgtgcgttcaactcacaaagtttaacctttcttttcatagagcagttaggaaacactctgtttgtaaagtctgcaagtggatattcagacctctttgaggccttcgttggaaacgggtttttttcatataaggctagacagaagaattctcagtaacttccttgtgttgtgtgtattcaactgacagagttgaactttcatttagagagagcagatttgtaacactgtatttgtggaatttgcaagtgtagatttcaagcgatttgcggccaaaggcagaaaaggaaatatcttcgtataaaaactagacaggatcattctcagaaactgctctgcgatgtgtgcgttcaactctcagaatttaacttttcttttcattcagcagtttggaaacactctgtttgtaaagtctgcacgtggatattttgaccacttagaggccttcgttggaaacgggtttttttcctgtaaggctagacagaagaattcccagtaacttccttgtgttgtgtacattcaactcacagagttgaacgttcccttagacagagcagatttgaaacactctttttgtgcaattggcaagtggagatttcaagcgctttgaggtcaatggcagaaaaggaaatatcttcgtttcaaaactagacagaatcattcccacaaactgcgttgtgatgtgttcgttcatctcacagagtttaacctttcttttcgtagagcagttaggaaacagtctgtttgtaaattctgtaagtggatattctgacatgcttgtggccttcgttggaaacgggatttgcttcatattctgctagacagaagaattctcagtaacttcgttgtgttgtgtgttttcaactcacagagttaaaggatcatttacacagagtagacttgaaacactctttttgtggaattggcagggtggagatttcagccgctttgaggtcaatggtagaaaaggaaatatcttcgtataaaaactagacagagtgattctcagaaactcctttgtgatgtctgcgttcaactcacagagtttaacctttcttttcatagagcagttaggaaacactctgtttgtaaagtctgcaagtggatattccgacctccttgagggcttcgttggaaacgggatttcttcatattatgctagacagaagaattcccagtaacttccttgtgttgtgtgtgttcaacccacagagttgaactttcatttacacagagcagatttgaaacactctttttgtggaatttgcaagtggagatttcaagcgctttgaagccaaaggcagaaaaggaaatatcttcgtttcaaaactagacagaatcattctcagaaactgctctgcgatgtgtgcattcaactctcagagtttaacttttcttttcattcagcagtttggaaacactctgtttgtaaagtctgcacgtggataatttgaccacttagaggccttcgttggaaacgggtttttttcatgtaaggctagacagaagaattcccagtaacttccttgtgttttgtgcattcaactcacagagttgaacgttcccttagacagagcagatttgaaacactctatttgtgcaatttgcaagtgtagatttcaagcgctttaaggtcaatggcagaaaaggaaatatcttcgtttcaaaactagacagaatcactcccacaaactgcgttgtgatgtgtgcgttcaagtcaaagagtttaacctttcttttcatagagcagttaggaaacactctgtttgtaaagtctgcaagtggatattcagacctccttgaggccttcgttggaaacgggatttcttcatattctgctagacagaatgattctcagaaactcctttgtgatgtgtgcgttcaactcacagagtttaacctttcttttcatagagcagttaggaaacactctgtttgtaaagtctgcacgtggatattcagacctctttgaggccttcgttggaaacgggatttcttcatattctgctagacagaagaattcccagtaacttccttgtgttgtgtgtgttcaactcacagagttgaactttgatttacactgagcagatttgaaacactctttttgtggaatttgcaagtggagatttcaagcgctttgaggccaaaggcagaaaaggaaatatcttcgtataaaaactagacagaatcattctcagaaacagctctgcgatgtgtgcgttcaactctcagagtttaacttttcttttcattcagcagtttggaaacactctgtttgtaaagtctgcacgtggataatttcaccacttagaggtcttcgttggaaacgggattttttcatgtaaggctagacagaagaattcctagtaacttcccttgggttgtgtacattcaactcacagagttgaacgttcccttagacagagcagatttgaaacactctttttgtgcaattggcaagtggtgatttcagccgctttgcggtcaatggtataaaaggaaatatcttcgtattaaaactagacagaatcattcccacaaactgcgttgtgatgtgttcgttcaactcacagagtttaacctttcttttcatagagcagttacgaaacagtctgtttgtaaattctgtaagtggatattctgacatcttgtggccttcgttggaaacgggatttcttcatattctgctagacagaagaattctcagtaacttccttgtgttgtgtgtattcaactcacagagttgaactctggtttacacagagcagatttgaaacactctttttgtggaatttgcaagtggagatttcagccgctttgaggtcaatggtagaaaaggaaatatcttcgtataaaaactagacagaatgattctcagaaactcctttgtgatgtgtgcgttcaactcacagagtttaacctttcttttcgtagagcagttaggaaacactctgtttgtaaactctgcaagtggatatacagacctctttgaggccttcgttggaaacgggatttcttcatactatgctagacagaagaattcccagtaacttccttgtgttgtgtgtgttcaactcacagaattgaactttcatttacacagagcagatttgaaacactctttttgtggaatttgcaagtggagatttcaagcgctttgaggccaaaggcagaaaaggaaatatcttcgtttcaaaactagacagaatcattctcagaaactgctctgcgatgtgtgcgttcaactctcagagtttaacttttcttttctttcagcagtttggaaacactctgtttgtaaagtctgcacgtggataatttgaccacttagaggccttcgttggaaacgggtttttttcatgtaaggctagacagaggaattctcagtaacttccttgtgttgtgtgtattcaactcacagagttgaacgatcctttacacagagcagacttgtaacactctttttgtggaatttgcaagtggagatttcagccgctttgaagtcaaaggtagaaaaggaaatatcttcctataaaaactagacagaatcattcccagaaactgcgttgtgatgtgttcgttcaactcacagagtttaacctttctgttcatagagcagttaggaaacactctgtttgtaaagtctgtaagtggatattctgacatcttgtggccttcgttggaaacgggatttcttcatattctgctagacagaagaattctcagtaacttccttgtgttgtgtgtattcaactcacagagttgaacgatcctttacacagagcaaacttgaaacactctttttgtggaatttgcaagtggagatttcagccgctttgaggtcaatggtagaaaaggaaactatcttcatataaagactagacagaatgattctcagaaactcctttgtgatgtgtgtgttcacctcacagagtttaacctttcttttcatagagcagttagtaaacactctgtttataaagtctgcaagtggatattcagacccctttgaggccttcgttggaaacggtatttcttcatattatgctagacagaggaattcccagtaacttccttgtgttgtgtgtgttcaactcacagagttgaactttcatttacacagagcagatttgaaacactctttttgtggaatttgcaggtggagatttcaagcgctttgaggccaaaggcagaaaaggaaatatcttcgtataaaaactagacagaatcattctcagaaaatgctctgtgatgtgtgcgttgaactctcagagtttaacttttgttttcattcagcagtttggaaatactctgtttgtaaagtctgcacgtggatattttgaccacttagaggccttctttggaaacgggtttttttcatgtaagggtagacagaagaattcccagtaacttccttgtgttgtgtgcattcaactcacagagttgaacgttcccttagacagagcagatttgaaacactctatttgtgcaatttgcaagtgtagaattcaagcgctttaaggtcaatggcagaaaaggaaatatcttcgtttcaaaactagacagaatcattcccacaaactgcgttgtgatgtgttcgttcaactcacagagtttaacctttctgttcatagagcagttaggaaacactctgtttgtaaagtctgtaagtggatattgctgacatacttgtggccttcgttggaaacgggatttcttcatattctgctagacagagagattctcagtaacttccttgtgttgcgtgtattcaactcacagagttcaacgatcctttacacagagcagacttgaaacacactttttgtggaatttgcaagtggagatttcagccgctttgaggtcagtggtagaaaaggaaatatcttcgtataaaaactagacagaatgattctcagaaactcctttgtgatgtgtgcgttcaactcacagagtttaacctttcttttcatagagcagtgaggaaacactctgtttgtaaagtctgcaagtggatattcagacctctttgtggccttcgttggaaacgggatttcttcatattatgctagacagaagaattcccagtaacttccttgtgttgtgtgtgttcaactcacagagttgaactttcatttacacagagcagatttgaaacactctttttgtgcaatttgcaagtggcgatttcaagcgctttgaggccaaaggcagaaaaggaaatatcttcgtataaaaactagacagaatcattctcagaaactactctgtgatgtgtgcgttcaactctcagagtttaacttttcttttcattcagtagtttggaaacactctgtttgtaaatctgcacgtggatattttgacgacttagaggctttcgttggaaacgggtttttttcatgtaaggctagacagaagaattcccagtaacttccttgtgttgtgtgcattcaactcacagagttgaacgttcccttagacagagcagatttgaaacactctatttgtccaatttgcaagtgtagatttcaagcgctttaaggtcaacggcagaaaaggaaatatcttcgtttcaaaactagacagaatcattcccacaaactgcgttgtgatgtgttcgttcaactcacagagtttaacctttctgttcatagagaagttaggaaacactctgtttgtaaagtctgtaagtggatattctgacatcttgtggccttcgttggaaacgggatttcttcatattctgctagacagaagaattctcagtaacttccttgtgttgtgtgtattcaactcacagagttgaacgatcctttacacagagcagacttgtatcactctttttgtggaatttgcaagtggagatttcagccgctttgaagtcaaaggtagaaaaggaaatatcttcctataaaaactagacagaatgattctcagaaactcctttgtgatgtgtgtgttcaactcacagagtttaacctttcttttcatagagcagttagtaaacactctgtttataaagtctgcaagtggatattcagacccctttgaggccttcgttggaaacgggatttctccatattatgctagacagaaggattcccagtaacttccttgtgttgtgtgtgttcaactcacagagttgaactttcttttacaaatagcagatttgaaacactctttttgtggaatttgcaagtggagatttcaagcgctttgaggccaaaggcagaaaaggaaatatcttcgtataaaaactagacagaatgattctcagaaactcctttgtgatgtgtgcgttcaactcacctttcttttcatagagcagttaggaaacactctgtttgtaaagtctgcacgtggatatttggacttctttgaggccttcgttggaaacgggtttttttcatgtaaggctagacagaataattcccagtaacttccttgtgttgggtgcattaaactcacagagttgaacgttcccttagacagagcagatttgaaacactctatttgtgcaatttgcaagtgtagatttcaagcgctttaaggtcaatggcagaaaaggaaatatcttcgtttcaaaactagacagaatcattcccacaaactgcgttgttatgtgttcgttcaactcacagagtttaacctttcttttcatagagcagttaggaaacactctgtttgtaaattctgtaagtggatattctgacaacttgtggccttcgttggaaacgggatttcttcatactatgctagatagaaagaattctcagtaacttccttgtgttgtgtgtattcaactcacagcagttgaacgatcctttacacagagcagacttgaaacactctttttgtggaatttgcaagtggagatttcagccgctttgaggtcaatagtcgaaaaggaaatatcttcgtagaaaaactagacagaatgattctcagaaactcctttgtgatgtgtgcgtttaactcacagaatttaacctttcttttcatagagcagttaggaaacactctgtttgttaaagtctgcaagtggatattcagacctctttgaggccttcgttggaaacgggatttcttcatattctgctagacagaagaattctcagtaacttccttgtgttgtgtgtattcaactgacagagttgaactatcatttagagagagcagatttgaaacactgtttttgtggaatttgcaagtggagatttcaagcgctttggggccaaaggcagaaaaggaaatatcttcgtataaaaactagacataatcattctcagaaactgctctgcgatgtgtgccttcaactctcagagtttaacttttcttttcattcagcagtttggaaacactctgtttgtaaagtctgcacgtggatattttgaccacttagaggccttctttggaatcgggtttttttcctgtaaggctagacagaagaattcccagtaacttccttgtgttgtgtacattcaactcacagagttgaaggttcccttagacagagcagatttgaaacactctttttgtgcaattggcaagtggagatttcaagcgctttaaggtcaatggcagaaaaggaaatatcttcgtttcaaaactagacagaatcattcccacaaactgcgttgtgatgcgtttgttcaactcacagaatttaacctttcttttcatagagcagttaggaaacagtctgtttgtaaattctgtaagtggatattctgacatcttgtggcctcgctggaaacgggattacttcatattctgctagacagaagaattctcaataacttccttgtgttgtgtgtattcaactcacagagttgaacgatcctttacacagagcagatttgaaacactctttttgtggaatttgcaagtggagatttcagccgctttgaggtcaatggtagaaaaggaaatatcttcgtatgaaaactagacagaatgattctcataaactccctttgtgatgtgtgcgttcaactcacagagtttaacctttcttttcatagagcagttaggaaacactctgtttataaagtctgcaagtggatattcagacctccttgaggccttcgttggaaacgggatttcttcatattctgctagacagaagaattctcagtaacttccttgtgttgtgtgtattcaactgacagagttgaactttcatttagacagagcagatttgaaacactctttttgtggaatttgcaaatggagatttcaagcgctttgaggccaaaggcagaaaaggaaatatcttcgtataaaaactagacagaatgattctcagaaactgctctgcgatgtgtgcgttcaactctcagagtgtaacttttcttttcattcagcagtttggaaacactctgtttataaagtctgcacgtggatattttgaccacttagaggccttcgttggaaacgggattttttcatgtaaggctagaccgaagaattcccagtaacttccttgtgttgtgtacattcaactcacagagttgaacgttcccttagacagagcagatttgaaacactctttttgtgcaattggcaagtggagatttcaagcgctttaaggtcaatggcagaaaaggaaatatcttcgtttcaaaactagagagaatgattctcagaaacttcattgtgacgtgtgcgttcaactcacagagtttaacctttcttttcatagagcagttaggaaacagtctgtttgtcaattctgtaagtggatattctgacatcttgtggccttcgttggaaacgggatttcttcatattctgctagacagaagaattcccagtaacttccttgtgtggtgtgtattcaactcacagagttgaacgatgctttacacagagcagacttgaaacactctttttgtggaatttgcaagtggagatttcagccgctttgaggtcaatggtagaataggaaatatcttcctatagaaactagacagagtgattctcagaaactcctttgtgatgtctgcgttcaactcacagagtttaacctttcttttcatagagcagttaggaaacactctgtttgtaaagtctgcaagtggatattcagacctccttgaggccttcgttggaaatgggatttcttcatattatgctagacagaagaattctcagtaacttccttgtgttgtgtgtattcaactcacagagttgaactttcatttagagagagcagatttgaaacactgtttttgtggaatttgcaagtggagatttcaagcgctttgcggccaaaggcagaaaacgaaatatcttcgtataaaaactagacagaatcattctcagaaactgctgcgtgatgtgtgcgctcaactctcagaatttaacttttcttttcattcagcggtttggaaacactctgtttgtaaagtctgcacgtggatattttgaccacttagaggccttcgttggaaacgggtttttttcatgtaaggctagacggaagaatttcccagtaacttccttgtgttgtgtgcattcaactcacagagttgaacgttcccttagacagagcagatttgaaacactctatttgtgcaatttgcaagtgtagatttcaagcgctttaaggtcaatggcagaaaaggaaatatcttcgtttcaaaactagacagaatcattcccacaaactgcgttgtgatgtgttcgttcaactcacagagtttaacctttctgttcatagagcagttaggaaacactctgtttgtaaagtctgtaagtggatattctgacatcttgtggccttcgttggaaacgggatttctttatattctgctagacagaagaattctcagtaacttccttgtgttgtgtgtattcaactcacagagttgaacgatactttacagagagcagacttgacacactctttttgtggaatttgcaattggagatttcagccgctttgaggtcaatggtagaataggaaatatcttcctatagaaactagacagaatgattctcagaaactcctttgtgatgtgtgcgttcaactcacagagtttaacctttcttttcatagagcagttgggaaacactctgtttgtaaagtctgcaagtggatattcagacttctttgaggccttcgttggaagcgggatttcttcatgttctgctagacagaagaattcccagtaacttccttgtgttgtgtgtgttcaactcacagagttgaactttgatttacacagagcagatttgaaacactccttttgtggaatttgcaagtggagatttcaagcgctttgaggccaaaggcagaaaaggaaatatcttcgtataaaaactagacagaatcattctcagaacctgctgcgcgatatgtgcgttcaactctcagagtttaacttttcttttcattcagcggtttggaaacactctgtttgtaaagtctgcacgtggatattttgaccacttagagtccttcgttggaaacgggtttttttcatgtaaggctagacagaagaattcccagtaacttccttgtgttgtgtgcattcaactcacagagttgaacgttcccttagacagagcagatttgaaacagcctatttgtgcaatttgcaagtgtagatttcaagcgctttaaggtcaacggctgaaaaggaaatatcttcctttcaaaactagacagaatcattcccacaaactgcgttgtgatgtgttcgttcaactcacagagtttaacctttctgttcatagagcagttaggaaacactctgtttgtaaagtctgtaagtggatattttgacatcttgtggccttcgttggaaacgggatttcttcatattctgctagacagaagaattctcagaaacttccttgtgttgtgtgtattcaagtcacagagttgaacgatcctttacacagagcagacttgaaacactctttttgtggaatttgcaagtggagatttcagccgctttgaggtcaatgttagaaaaggaaatatcttcgtataaagactagacagaatgattctcagaaaatcttttgtgatgtgtgcgttcaactcacagagtttaacatttcttctcatagagcagttaggaaacactctgtttgtaaagtctgcaagtggatattcagacttctttgaggccttcgttggaaacgggatttcttcatattatgctagacagaagaattctcagtaacttccttgtgttgtgtgtattcaactgacagagttgaactttcatttagagagagcagatttgaaacactgtttttgtggaatttgcaagtggagatttcaagcgctttggggccaaaggcagaaaacgaaatatcttcgtataaaaagtagacagaatcattctcagaaactgctctgcgatgtgtgcgttcaactctccagagtttaacttttcttttcattcagcagtttggaaacactctgtttgtaaagtctgcacgtggatattttgaccatttagaggctttcgttggaaacgggtttttttcttgtaaggctagacagaagaattcccagtaacttccttgtgttgtgtgcattaaactcacatagttgaacgtttccttagacagagctgaattgaaacacgctatttgtgcaatttgcaagtgtagatttcaagcgctttaaggtcaatggcagaaaaggaaatatcttcgtttcaaaactagacagaatcattcccacaaactgcgttgtgatgtgttcgttcaactcacagagtttaaactttcttttcatagagcagttaggaaacagtctgtttgtcaattctgtaagtggatattctgacatcttgtggccttcgttggaaacgggatttcttcatattctgctagacagaagaattctcagtaacttccttgtgttgtgtgtattcaactcacagagttgtacgatcctttacacagagcagacttgaaacactctttttgtggaatttgcaagtggagatttcagccgctttgaggtcaatggtagaaaaggaaatatcttcgtataaagactagacagagtgattctcagaaactcctttgtgatgtctgcgttcaactcacagagtttaacctttcttttcatagagcagttaggaaacactctgtttgtaaagtctgcaggtgcatattcagacctccttgaggccttagttggaaacgggatttcttcatattctgctatacagaagaattctcagtaacttccttgtgttgtgtgtattcaactcacagagttgaactttcatttacacagagcagatttgaaacactctttttgtggaatttgcaaatggagatttcaagcgctttgaggccaaaggcagaaaaggaaatatcttcgtttcaaaagtagacagaatcattctcagaaactgctgcgttatgtgtgcgttcaactctcagagtttaacttttcttttcattcagcggtttggaaacactctgtttgtaaagtctgtaagtggatattttgaccacttagaggccttcgttggaaatggttttttgcatgtaaggctagacagaagtattcccagtaacttccttgtgttgtgtgcattcaactcacagagttgaacgttccctaggacagagcaggtttgaaacactctatttgtgcaatttgcaagtgtagatttcaagcgcattaaggtcaatggcagaaaaggaaatatcttcgtttcaaaactagacagaatcattcccacaaactgcgttgtgatgtgttcggtcaactcacagagtttaacctttcttttcatagagcagttaggaaacagtctgtttgtcaattctgtaagtggatattctgacatcttgtggccttcgttggaaacgggatttcttcatattctgctagacagaagaattctcagtaacttccttgtgttgtgtgtattcaactcacagagttgaacgatcctttacacagagcagacttgtaaaactctttttgtggaatttgcaagtggagatttcagccgctttgaagtcaaaggtagaaaaggaaatatcttcctataaaaactagacagaatgattctcagaaactcctttgtgatgtgtgcgttcaactcacagagtttaacctttcttttcatagagcagataggaaacactctgtttgtaaagtctgcaagtggatattcagacctccttgaggccttcgttggaaacgggatttcttcatattatgctagacagaagaattctcagtaacttccttgtgttgtgtgtattcaactgacagagttgaactttcatttagagagagaagatttgaaacactgtttttgtggaatttgcaagtggagatttcaagcgctttggggccaaaggcagaaaaggaaatatcttcgtataaaaactagacagaatcattctcagaaactgctgcgtgatgtgtgcgttcaactctcagagtttagcttttcttttcattcagcggtttggaaacactctgtttgtaacgtctgcacgtggatattttgaccacttagaggccttcgttggaaacgggttttttgcatgtaaggctagacagaagaattcccagtaacttccttgtgttgtgtgcattcaactcacagagttgaacgttcccttagacagagcagatttgaaacactctatttgtgcaatttgcaagtgtagatttcaagcgcattaaggtcaatggcagaaaaggaaatatcttcgtttcaaaattagacagaatcattcccacaaactgcgttgtgatgtattcgttcaactcacagagtttaacctttctgttcatagagcagttaggaaacactctgtttgtaaagtctgtaagtggatattctgacatcttgtggcccttcgttggaaacgggatttcttcatattctgctagacagaagaattctcagtaacttccttgtgttgtgtgtattcaactcacagagttgaaggatcctttacagagagcaggctagaaaaactctttttgtcgaatttgcaagtggagatttcagccgctttgaggtcaatggtagaataggaaatatcttcttatagaaactagacagaatgattctcagaaactcctttgtgatgtgtgtgttcaactcacagagtttaatctttcttttcatagagcagttagtaaacactctgtttataaagtctgcaagtggatattcagacccctttgaggccttcgttggaaacgggatttcttcatattatgctagacagaagaaatctcagtaacttccttgtgttgtgtgtattcaactgacagagttgaagtttcatttagacagagcagatttgaaacactatttttgtgcaatttgcaagtggagatttcaagcgctttggggccaaaggcagaaaaggaaatatcttcgtataaaaactagacagaatcattatcagaaactgctgcgtgatgtgtgcgttcaactctcagaatttaacttttcttttcattcagcggtttggaaacactctgtttgtaaagtctgcacgtggatattttgaccacttagaggccttcgttggaaacgggtttttttcatgtaaggctagacagaagatttcccagtaacttccttgtgttgtgtacattaaactcacagagttgaacgttcccttagacagagcagatttgaaacactctttttgtgcaattggcaaatggagatttcaagcgctttaaggtcaatggcagaaaaggaaatatcttcgtttcaaaactagacagaatcattcccacaaactgcgttgtgatgtgctcgttcaactcacagagtttaacctttctgttcacagagcagttaggaaacactctgtttgtaaagtctgtaagtggatattctgacatcttgtggccttcgttggaaacgggatttcttcatattctgctagacagaagaattctcagtaacttccttgtgttctgtgtattcaactcacagagttgaacgatcctttacacagagcagacttgaaacactctttttgtggaatttgcaagtggagatttcagccgctttggggtcaatagtagaaaaggaaatatcttcgtagaaaaactagacagaatgattctcagaaactcctttgtgatgtgtgtgttcaactcacagagtttaacctttcttttcatagagcagttagtaaacactctgtttataaagtctgcaagtggatattcagacccctttgaggccttcgttggaaacgggatttattcatattatgctagacagaagaattctcagtaacttccttgtgttgtgtgtattcaactgacagagttgaactttcatttagagagagcagttttgaaacactgtttttgtggaatttgcaagtggagatttcaagcgctttggggccaaaggcagaaaaggaaacatcttcgtatgaaaactagacagaatcattctcagaaagtgctctgcgatgtgtgcgttcaactctcagagtttaactttgcttttcattcagcagtttggaaacactctgtttgtaaagtctgcacgtggataatttgaccacttagaggccttcgttggaaacgggtttttttcatgtaaggctagacagaagaattcccagtaacttccttgtgttgtgtacattcaactcacagagttgaacgttcccttagacagagcagatttgaaacactctttttgtgcaattggcaagtggtgatttcagccgctttgaggtcaatggtagaaaaggaaatatcttcgtataaaaactagacagaatgattctcagaaactcctttgtgatgtgtgcgttcaactcacacagtttaacctttcttttcagagagcagttaggaaacactctgtttgtaaagtctgcaagtggatattcagacctccttgaggccttcgttggaaacgggatttcttcatattatgctagacagaagaattctcattaacttccttgtgttgtgtgtattcaactcacagagttgaacgatcctttacacagagcagacttgtaacactctttttgtggaatttgcaagtggagatttcagccgctttgaagtcaaaggtagaaaaggaaatatcttcctataaaaattagacagaatgattctcagaaactcctttgtgatgtgtgtgttcaactcacagagtttaacctttcttttcatagagcagttaggaaacactctgtttgtaaagtctgcaagtggatattcagacctctttgaggccttcattggaaacgggctttttttcctataaggctagacagaagaattccgagtaacttccttgtgttgtgtgtgttcaactcacagagttgaactttcatttacacagagcagatttgaaacactctttttgtggaatttgcaagtggagatttcaagcgctttgaggccaaaggcagaaaaggaaatatctccgtttcaaaactagacagagaatcattctcagtaaactgctctgcgatgtgtgcgttcaactctcagagtttaacttttcttttcattcagcagtttggaaacactctgtttgtaaagtctgcacgtggatattttgaccacttagaggccttcgttggaaacgggtttttttcctgtaaggctagacagtagaattcccagtaacttccttgtgttgtgtacattcaactcacagagttgaacgttcccttagacagagcagatttgaaacactctttttgtgcaattggcaaatggagatttcaagcgctttaaggtcaatggcagaaaaggaaatgtcttcgtttcaaaactagacagaatcattcccacaaactgcgttgtgatgtgttcgttcaactcacagagtttaacgtttcttttcatagagcagttaggaaacagtctgtttgtcaattctgtaagtggatattctgacatcttgtggccttcgttggaaacgggatttcttcatattctgctagacagaagaattctcagaatcttccttgtgttgtgtgtattcaactcacagagttgaacgatcctttacacagagcagacttgaaacactatttttgtggaatttgcaagtggagatttcagccgctttgaggtccatggtagaaaaggaaatatcttcgtataaaaactagacagaatgattctcagaaactcctttgtgatgtgtgcattcaacttacagagtttaacctttcttttcatagagcagttaggaaacactctgtttgtaaagtctgcaagtggatactcagacctctttgaggccttcgttggaaacgggatttcttaatattatgctagacagaagaattcccagtaacttccttgtgttgtgtgtgttcaactcacagagttgaactttcatttacacaaagcagatttgaaacactctttttgtggaatttgcaagtggagatttcaagcgctttgaggccaaaggcagaaaaggaaatatcttcgtttcaaaactagacagaatgattctcagaaactgctctgcgatgtgtgcgttcaactctcagagtttaacttttcttttcattcagcagtttggaaacactctgtttgtaaagtctgcacgtggatattttgaccatttagaggccttcgttggaaacgggtttttttcttgtaaggctagacagaagaattcccagtaacttccttgtgttgtgtacattcaactcacagagttgaacgttcccttagacagagcagatttgaaacactctttttgtgcaattggcaagtggtgatttcagctgctttgaggtcaatggcagaaaagggaatatcttcgtataaaaactagacagaacgattctcagaatcttccttgtgatgtgtgcgttcaactcacagagtttaacctttcttttcatagagcagttaggaaacactctgtttgtaaactctgcaagtggatattcagacctcattgaggccttctttggaaacgggatttcttcatactatgctagacagaagaattctcagtaacttccttgtgttgtgtgtattcaactcacagagttgaacgatcctttacacagagcagacttgaaacactctttttgtggaatttgcaagtcgagatttcagccgctttgaggtcaatggtagaaaaggaaatatcttcgtataaaaactagacagaatgattctcagaaactgctttgtgatgtgtgcgtttaactcacagagtttaacctttcttttcatagagcagttaggaaacactctgtttgtaaagtctacaagtgtatattcagacctctttgaggccttcgttggaaacgggtttttttcatataaggctagacagaagaattctcagtaacttccttgtgttgagtgtattaaactcacagagttcaatgatcctttacacagagcggacttgaaacactctttttctggaatttgcaagtggagatttcagccgcgttgaggtcaatggtagaaaagggaaatatcttcgtataaaaactagacagaatgattctcagaaactcctttatgatgtgtgcgttcaactcacagagtttaacctttcttttcatagagcagttaggaaacactctgtttgtaaagtctgcaagtggatattttcacctctttgaggccttcgttggaaacgggttttttttcatgtaaggctagacagaagaattctcagtaacttccctgtgttgtgtgttttcaactgacagagttgaactttcatttagagagagcagatttgaaacactgtttttgtggaatttgcaagtggagatttcaagcgttttggagccaaaggcagaaaaggaaatatcttcgtataaaaactagacagaatcattctcagaaactgctgcgtgatgtgtgcgttcaactctcagagtttaacttttcctttcattcagcggtttggaaacactctgtttgtaaagtctgcacgtggatattttgaacacttagaggccttcgttggaaacgggtttttttcatgtaaggctagacagaagaatttccagtaacttccttgtgttgtgtgcattcaactcacagagttgaacgttcccttagacagagcagatttgaaacactctagttgtgcaatttgcaagtgtagatttcaagcgctttaaggtcaatggcagaaaaggaaatatcttcgtttcaaaactagacagaatgattctcagaaaatcttttgtgatgtgtgcgttcaactcacagagtttaacttttcttctcatagagcagttaggaaagactctgtttgtaaagtctgcaagtggatattcagacctctttgaggccttcgttagaaacgggatttcttcatattatgctagacagaataattctcagtaacttccttgtgttgtgtgtattcaactcacagagttgaacgatcctttacagagagcaggcttgaaacactctatttgtcgaatttgcaagtggagatttcagccgctttgaggtcaatggtagaataggaaatatcttcttatagaaactagacagagtgattctcagaaactcctttgtgatgtctgcgttcaactcacagagtttaacctttcttttcatagagcatttaggaaacactctgtttgtaaagtctgcaagaggatattcagacctccttgaggccttcgttggaaacgggatttcttcatattctgctatacagaagaattcccagtaacttccttgtgttgtgtgtgttcaactcacagagtttgaactttcatttacacagagcagatttgaaacactctttttgtggaatttgcaaatggagatttcaagcgctttgaggccaaaggcagaaaaggaaatatcttcgtataaaaactagacagaatcattctcagaaactgctctgcgatgtgtgcgttcaactctcagagtttaacttttcttttcattcagcagtttggaaaccctctgtttgtaaagtctgcacgtggataatttgaccacttagaggccttcgttggaaacgggtttttttcatgtaaggctagacagaagaattcccagtaacttccttgtgttgtgtacattcaactcacagagttgaacgttcccttagacagagcagatttgaaacactctttttgtgcaattggcaagtggagatttcaagcgctttgaggtcaatggcagaaaaggaaatatcttcgtttcaaaactagacagaatcattcccacaaactgcgttgtaatgtgtgcgttcaactcacagagtttaacctttcttttcatagagcagttaggaaacactctgtttgtaaagtctgcaagtggatattcagacctctttgaggccttcgttggaaacgggatttcttcatattctgctagacagaagaattctcagtaacttccttgtgttgtgtgtattcaactcacagagttgaacgatcctttacacagaacagacttgaaacactctttttgtggaatttgcaagtgcagatttcagccgctttgaggtcaatggtagaataggaaatatcttcctatagaaactagacagaatgattctcagaaactcctttgtgatgtgtgcgttcaagtcgcagagtttaacctttcttttcttggagcagttaggaaacactctgtttgtaaagtctgcacgtggatattcagacctctttgaggccttcgttggaaacgggatttcttcatattctgctagacagaagaattcccagtaacttccttgtgttgtgtgtgttcaactcacagagttgaactttcattttcacagagcagatttgaaacactctttttgtggaatttgcaagtggagatttcaagcgctttgaggccaaaggcagaaaaggaaatatcttcgtttcaaaactagacagaatcattctcagaaactgctctgcgatgtgtgcgttcaactctcagagtttaacttttcttttcattcagaagtttggaaacactctgtttgtaaagtctgcacgtggatattttgaccacttagaggccttcgttggaaacgggtttttttcctgtaaggctagacagaagaattcccagtaacttccttgtgttgtgtacattcaaatcacagagttgaacgttcccttagacagagcagacttgtaacactctttttgtggaattttcaagtggagatttcagccactttgaagtcaaaggtagaaaaggaaataacttcctataaaaactagacagaatcattcccacaaactgcgctgtgatgtgttcgttcaactcacagagtttaacctttctgttcatagagcagttaggaaacactctgtttgtaaagtctgtaagtggatattctgacatcttgtggccttcgttggaaacgggatttcttcatattatgctagacagaagaattctcagtaacttccttgtgttgtgtgtattcaactcacagagttgaccgatcctttacacagagcagacttgtaacactctttttgtggaatttgcaagtggagatttcagccgctttgaagtcaaaggtagaaaagggaatatcttcatataaaaactagacagaatgattctcagaaactcctttgtgatgtgtgcgttcaagtcacagagtttaacctttcttttcatagagcagttaggaaacactctgtttgtaaagtctgcaactggagattcagccctctttgaggccttcgttggaaacgggatttcttcatattctgctagacagaagaattcccagtaacttccttgtgttgtgtgtgttcaactcacagagttaaactttcatttacacagagcagatttgaaacactctttttgtggaatttgcaagtggagatgtcaagcgctttgaggccaaaggcagaaaaggaaatatcttcgtttcaaaactagacagaatcattctcagaaactgctctgcgatgtgtgcgttcaactctcagagtttaacttttcttttcattcagcagtttggaaacactctgtttgtaaagtctgcacgtggatattttgaccacttagaggccttcgttggaaacgtgtttttttcctgtaagcctagacagaagaattcccagtaaattcctagtgttgtgtgcattcaactcacagagatgaacgttcccttagacagagcagatttgaaacactctgtgcaatttgcaagtgtagatttcaagcgctttaatgtcaatggcagaaaaggaaatatcttcgcttcaaaactagacagaatcattccaacaaactgcgttgtgatgtgctctttcaactcatagagtttaacctttctgttcatagagcagttaggaaacactctgtttctaaagtctgtaagtggatattctgacatcttgtggccttcgttggaaacgggatttcttcatattctgctacacagaagaattctcagtaacttccttgtgttgtgtgtattcaactcacagagttgaacgatcctttacagagagcatacttgaaacactctttttgtggaatttgcaagtggagatttcagccgctttgaggtcaatggtagaataggaaatatcttcctatagaaacaagacagaatgattctctgaaactcctttgtgatgtgtgcgttcaactcacagagtttaacctttcttttcatagagcagttaggaaacactctgtttgtaaagtctgcaagtggatattcagacctccttgaggccttcgttggaaacgggatttcttcatattatgctagacagaagaattctcagtaacttcccttgtgttgtgtgtattcaactgacagagttgaactttcatttagagagagcagatttgaaacactgtttttgtggaatttgcaagtggagatttcaagcgctttggggccaaaggcagaaaaggaaatatcttcgtataaaaactagacagaatcattctcagaaactgctgcgtgatgtgtgcgttcaactctcagagtttaacttttcttttcattcagcggtttggaaacactctgtttgtaaagtctgcacgtggaaattttgaccacttagaggccttcatggaaacgggtttttttcatgtaaggctagacagaagaattcccagtaacttccttgtgttgtgtgcattcaactcacagagttgaacgttcctttagacagagcagatttgaaacactctatttgtgcaatttgcaagtgtagttttcaagctctttaaggtcaacggcagaaaaggaaatatcttggtttcaaaactagacagaatcattcccacaaactgcgttgtcatgtgttcgttcaactcacagagtttaacctttcttttcatagagcagttaggaaacagtctgtttgcaaattctgtaagtggatattctgacatcttgtggccttcgttggaaacggcatttcttcatattctgctagacagaagaattctcagaatcttgcttgtgttgtgtgtattcaactcacagagttgaacgatcctttacacagagcagacttgaaacactctttttgtggaatttgcaagtggagatttcagccgctttgaggtccatggtagaaaaggaaatatcttcgtcataaaaactagacagaatgattctcagaaacttctttctgatgtgtgcgttcaactcacagagtttaacctttcttttcatagagcagttaggaaacactctgtttgtaaagtctgcaagtggatattcagacctctttgaggccttcgttggaaacgggatttcttcatactgtgctagacagaagaattcccagtaacttgccttgtgttgtgtgtgttcaactcacagagttgaactttcatttacacagagcagatttgaaacactctttttgtggaatttgcaaatggagatttcaagcgctttgaggccaaagacagaaaaggaaatatcttcgtataaaaactagacagaatcattctcagaaactgctctgtgatgtgtgcgttcaactctcagagtttaacttttcttttcattcagcagtttggaaacactctgtttgtaaagtctgcacgtgcataatttgaccacttagaggtcttcgatggaaacgggtttttttcatgtaaggctagacagaagaattcccagtaacttccttgtgttgtgtgcattcaactcacagagttgaacgttcccttagacagagcagatttgaaacactctatttgtgcaatttgcaagtgtagatttcaagcgctttaaggtcaatggcagaaaaggagatatcttcgtttcaaaactagacagaatcattcccacaaactgcgttgtgatgtgttcgttcaactcacagagtttaacctttctcttcatagagcagttaggaaacactctgtttgtgaagtctgtaagtggatattctgacatcttgtggccttcgttggaaacgggatttcttcatattctgctagactgaagaattctcagtaacttccttgtgttgtgtgtattgaactcacagtgttgaacgatcctttacacagagcagacttgaaacactctttttgtggaatttgcaagtggagatttcagccgctttgaggtcaacagtagaaaaggaaatatcttcgtagaaaaactagacagaatgattctcagaaactcctttgtgatgtgtgcgttcaactcacagagtttaacctttctgttcatagagcagttaggaaacactctgtttgtaaagtctgcaagaggatattcagacctccttgaggccttcgttggaaacgggatttcttcatattctgctagacagaagaattctcagtaacttccttgtgttgtgtgtattcaactgacagagttgaactttcatttagagagagcagatttataacactgtttttgtggaatttgcaagtggagatttcaagcgctttggggccaaaggcagaaaaggaaatatcttcgtataaaaactagacagaatcattctcagaaactgatgcgtgatgtgtgcgttcaactctcagagtttaacttttcttttcattcagcggtttggaaacactctgtttgtaaagtctgcacgtggatattttgaccacttagaggccttcgttggaaacgggtttttttcatgtaaggctagacagaagaattcccagtaacttccttgtgttgtgtgcattccactcacagagttgaacgttcccttagacagagcagatttgaaacactctatttgtgcaatttgcaagtgtagatttcaagcgctttaaggtcaatggcagaaaaggaaatatcttcgtttcaaaactagacagaaacattcccacaaactgcgttgtgatgtgttcgttcaactcacagagtttaacttttctgttcatagagcagttaggaaacactctgtttgtaaagtctgcaattggatattcagacctccttgaggcattcgttggaaacgggatttcttcatattctgctagacagaataattctcagtaacttccttgtgttctgtgtattcaactcacagagttgaacgatcctttacagagagcagactttaaacactctttttgtggaatttgcaagtggagatttcagccgctttgaggtcaatggtagaaaaggaaatatcttcgtataaagactagacagaatgattctcagaaactcctttgagatgtgtgcgttcaactcacagagtttaacctttcttttcatagagcagttaggaaacactctgtttgtaaagtctgcaagtggatattcagacctctttgaggccttcgttggaaacgggtttttttcatataaggctagacagaagaattctcagtaacttccttgtgttgtgtgtattcaactcacagagttgaatgatcctttacacagagcagacttgaaacactctttttgtggaatttgcaagtggagatttcagccgctttgaggtcaatggtagaaaagtaaatatcttcctataaagactagacagaatcattctcagaaactgctctgcgatgtgtgcgttcaactctcagagtttaacttttcttttcattcagcagtttggaaacactctgtttgtaaagtctgcacgtggataacttgaccacttagaggccttcgttggaaacgggtttttttcctgtaaggctagacagaagaattcccagtaacttacttgtgttgtgtacattcaactcacagagttgaacgttcccttagacagagcagatttgaaacactctttttgtgcaattggcaagtggtgatttcagctgctttgaggtcaatggtagaaaagggaatatcttcgtataaaaactagacagaatcattcccacaaactgcgttgtgatgtgttcgttcaactcacagagtttaacctttcttttcatagagcagttaggaaacagtctgtttgtaaattctgtaaatggatattctgacatcttgtggccttcgttggaaactggatttcttcatactatgctagacagaagaattctcagtaacttccttgttttgtgtgtattcaactcacagagttgaacgatcctttacacagagcagacttgaatcactctttttgtggaatttgcaagtggagatttcagccgcgttgaggtcaatggtagaaaaggaaatatcttcgtataaaaactagacagaatgattctcagaaactcctttgtgatgtgtgcgttcaactcacagagtttaacctttcttttcatagagcagttaggaaacactctgtttgtaaagtctgcaagtggatattcagacctactttgaggccttcgttggaaacgggtttttttcatataaggctagacagaagaattctcagtaacttccttgtgttgtgtgtattcaactgacagagttgaactttcatttagagagagcagatttgaaacactgtttttgtggaatttgcatgtggagatttcaagcgctttggggccaaaggcagaaaaggaaatatcttcgtataaaaactagacagaatcattctcagaaactgctctgcgatgtgtgcgttcaactctcagagtttaacttttcttttcattcagcagtttggaaacactctgtttgtaaagtctgcacgtggataacttgaccacttagaggccttcgttggaaaagggtttttatcctgtaagggtagacagaagaattcccagtaacttccttgtgttgtgtgcattcaactcacagatttgaacgttcccttagacagagcagatttgaaacactctatttgtgcaattggcaagtgtagatttcaagcgctttaaggtcaatggcagaaaaggaaatatcttcgtttcaaaactagacagaatcattcccacaaaatgcgttgtgatgtgttcgttcaactcacagagtttaagctttctgttcatagagcagttaggaaacactctgtttgtaaagtctgtaagtggatattctgatatcttgtggccttcgttggaaacgggatttcttcatattatgctagacagaagaattcccagtaacttccttgtgttgtgtgcattcaactcacagagttgaacgttcccttagacagagcagatttgaaacactctatttgtgcaatttgcaagtgtagatttcaagcgctttatggtcaacggcagaaaagtaaatatcttcgtataaagactagacagaatgattctcagaaactcctttgtgatgtgtgcgttcaactcacagagtttaacctttcttttcatagagcagttaggaaacactctgtttgtaaagtctgcaagtggatattcagacctccttgaggccttcgttggaagcgggatttcttcatattctgctagacagaagaattctcagtaacttccttgtgttgtgtgtattcaactgacagagttgaactttcatttcgagagagcagatttgaaacactgtttttgtggaatttgcaagtggagatttcaagcgctttggggctaaaggcagaaaaggaaatatcttcgtataaaaactagacagaataattctcagaaactgctgcgtgatgtgtgcgttcaactctcagagtttaacttttcttttcattcagcggtttggaaacactctgtttgtaaagtctgcacgtggatatattgaccacttagaggccttcgttggaaacgggtttttgcatgtaaggctagacagaagaattcccagtaacttccttgtgttgtgtgcattcaactcacagagttgaacgttcccttagacagagcagatttcaaacactctatttgttcaatttgcaagtgtagatttcaagcgctttaaggtcaatggcagaaaaggaaatatcttcgtttcaaaactagacagaatcattcccacaaactgggttgtgatgtgttcgttcaactcacagagtttaacctttcttttcatagagcagttaggaaacagtctgtttgtcaattctgtaagtggatattctgacatcttgtggccttcgttggaaacgggatttcttcatattctcctagacagaagaattctcagtaacttccttgtgttgtgtgtattcaactcacagagttgaacgatcctttacacagagcagacttgaaacactctttttgtggaatttgcaagtggagatttcagccgctttgagttcaatggtagaataggaaatatcttcctatggaaactagacagaatgattctcagaaactcctttgtgatgtgtgcgttcaactcacaagagtttaacctttctgttaatagagcagttaggaaacactctgtttgtaaagtctgcaagtggatattcagacctccttgaggccttctttggaaacgggatttcttcatattctgctagacagaagaattctcagaaacttccttgtgttgtgtgtattcaactcacagagttgaacgatcctttacacagagcagacttgaaacactctttttgtggaatttgcaagtggagatttcagccgctttgaggtccatggtagaataggaaatatcttcctatagaaactagacagaatcattctcagaaactgctctgcgatgtgtgcgttcaactctcagactttaacttttcttttcattcagcagtttggaaacactctgtttgtaaagtctgcacgtgcataatttgaccacttagaggccttcgttggaaacgggtttttttcatgtaaggctagacagaagaattcccagtaacttccttgtgttgtgtgcattcaactcacagagttgaacgttcccttagacagagcagatttgaaatactctatttgtgcaatttgcaagtgtagttttcaagctctttaaggtcaacggcagaaaaggaaatatcttggtttcaaaactagacagaatcattcccagaaactgcgttgtgatgtgttcgttcaactcacagagtttaacctttctgttcatagagcagttaggaaacactctgtttgtaaagtctgtaagtggatattctgacgtacttgtggccttcgttggaaacgggatttcttcatattctgctagacagaagaattctcagtaacttccttgtgttgtgtgtattcaactcacagagttgaacgatcctttacacagagcagtcttgaaacactctttttgtggaatttgcaagtggagatttctgccgctttggggccaaaggcagaaaaggaaatatcttcgtataaaaactagacagaatgattctcagaaactcctttgtgatgtgtgtgttcaactcacagagtttaacctttcttttcatagagcagttaggaaacactctgtttgtaaagtctgcaagtggatattcagacctccttgaggccttcgttggaaacgggatttcttcatattatgccagacagaagaattctcagtaacttccttgtgttgtgtttattcaactgacagagttgaactttcatttagagacagcagatttgaaacactgtttttgtggaatttgcaagtggagatttcaagcgctttggggccaaaggcagaaaacgaaatatcttcgtataaaaactagacagaatcattctcagaaactgctgcgtgatgtgtgcgttcaactctaagagtttaacttttcttttcattcagcggtttggaaacactctgtttgtaaagtctgcacgtggatattttgaccactaagaggccttcgttggaaacgggtttttttcatgtaaggctagacagaagaattcccagtaacttccttgtgttgtgtacattcaactcacagagttgaaagttcccttagacagagcagatttgaaacactctttttgtgccattggcaagtggagatttcaagcgctttaaggtcaatggcagaaaaggaaatatcttcgtttcaaaactagacagaatcattcccacaaactgcgttgtgatgtgttcgttcatctcacagagtttaacctttcttttcatagagcagttaggaaacactctgtttgtaaattctgtaagtggatattctgacatcttgtggccttcgttggaaaagggatttcttcatcttctgctagacagaagaattctcagaatcttccttgtgttgtgtgtattcaactcacacagttgaacgatggtttacacagagcagatttgaaacactctttttgtggaatttggaagtggagatttcagccgctttgaggtcaatggtagaaaaggaaatatcttcgtataaaaactagacagaatgattttcatgaactcctttgtgatgtgtgcgttcaactaacagagtttaacctttcttttcatagagcagttaggaaacactctgtttgtaaagtctgcaagtggatattcagacctccttgaggccttcgttggaaacgggatttcttcatattctgctagacagaagaattcccagtaacttccttgtgttgtgtgtgttcaactcacagagttgaactttcatttacacagagcagatttgaaacactctttttgtggaatttgcaagtggagatttcaagcgctttgaggccaaaggcagaaaagtaaatatcttcgtataaaaactagacagaaatcattctcagaaactgctctgcgatgtgtgcgttcaactctcaggagtttaacttttcttttcattcagcagtttggaaacactctgtttgtaaagtctgcacgtggatattttgaccacttagaggccttcgttggaaacgggtttttttcctgtaaggctagacagaagaattcccagtaacttccttgtgttgtgtgcattcaactcacagagttgaactttcccttagacagagcagatttgaaacactctatttgtgcaatttgcaagtgtagatttcaagcgctttaaggtcaatggcagaaaaggaaatatcttcgtttcaaaactagacagaatcattcccacaaactgcgttgtgatgtgttcgttcaactcacagagtttaacctttctgttcatagagcagttaggaaacactctgtttgtaaagtctgtaagtggattttctgacatcttgtggccttcgttggaaacgggatttcttcatattctgctacacagaataattctcagtaacttccttgtgttgtgtgtattcaactcacagagttcaacgatcctttacacagagcagacttgaaacactctttttgtggaatttgcaagtggagatttcagccgctttgaggtcaatggtagaaaaggaaactatcttcgtataaagactagaaagaatgattctcagaaactcctttgtgatgtgtgcgttcaactcacagagtttaacctttcttttcatagagcagttaggaaacactctgtttgtaaactctgcaagtggatattcacacctctttgaggccttcgttggaaacgggatttcttcatactgtgctagacagaagaattctcagtaacttccttgtgttgtgtgtattcaactcacagagttgaacgatcctttacacagagcggagttgaaacactctttttgtggaatttgcaagtggagatttcagccgcattgaggtcaatggtagaaaaggaaatatcttcgtataaaaactagacagaatcattctcagaaactgctctgcgatgtgtgcgttcaactctcagagttcaacttttcttttcattcagcagtttggaaacactctgtttgtaaagtctgcacgtggataatttgaccacttagaggccttcgttggaaacgggtttttttcatgtaaggctagacagaagaattcccagtaacttccttgtgttgtgtacattcaactcacagagttgaacgttcccttagatagagcagatttgaaacactctttttgtgcaattggcaagtggagatttcaagcgctttaaggtcaatggcagaaaaggaaatatcttcgtttcaaaactagacagaatcattcccacaaactgcgttgtgaggtgttcgttcaactcacagagtttaacctttcttttcatagagcagttaagaaacagtctgtttgtaaattctgtaagtggatattctgacatcttgtggccttcgttggaaacgggatttcttgatattctgctagacagaagaattctcagtaacttccttgtgttgtgtgtattcaactcacagagttgaacgatcctttacacagagcagacttgaaacactctttttgtggaatttgcaagtggagatttcagccgctttgaggtcaatgttagaataggaaatatcttcctataaaaactagacagaaagattctcagaaactcctttgtgatgtgtgcgttcaactcacagagtttaacctttcttttcatagagcagttaggaaacactctgtttgtaaagtctgcaagtggatattcagacctctttgaggccttcgttggaaacgggtttttttcatataaggctagagagaagaattctcagtaacttccttgtgttgtgtgtattcaactgacagcgttgaactttcatttagagagagcagatttgaaacactgtttttgtggaatttgcaagtggagatttcaagcgctttggggccaaaggctgaaaaggaaatatcttcgtataaaaactagacagaatgattctcagaaactcctttgtgatgtttgctttcaaatcacagagtttaacctttcttttcatagagcagttaggaaacactctggttgtaaagtctgcaagtggatattttgaccacttagaggtcttcgttggaaacgggtttttttcatgtaaggctagacagaagaattcccagtaacttccttgtgttgtgtgcattcaactcacagagatgaacgttcccttagacagagcagatttgaaacactctatttgtgcaatttgcaagtgtagatttcaagcgctttaaggtcaatggcagaaaaggaaatatcttcgtttcaaaactagacagaatgattctcagaaactcctttgtgatgtgtgcgttcaactcacagagtttaacctttcttttcatagagcagttaggaaacactctgtttgtaaagtctgcaagtggatattcagacatctttgaggctttcgttggaaacgggatttcttcacattctgctagacagaagaattctcagaaacttcgttgtgttgtgtgttttcaactcacagagttcaacgatcctttacacagagcagacttgaaacactctttttgtggaatttgcaagtggagatttcagccattttgaggtcaacgttagaaaaggaaatatcttcgtataaaaactagacagaatgattctcaaaaactcctttgtgatgtgtgcgttcaactcacagagttcaacctttcttttcctagagcagttgggaaacactctgtttgtaaagtctgcaagtggatattcagacatccttgaggctttcgttggaaacgggatttcttcatattctgctatacagaagaattcccagtaacttccttgtgttgtgtgtgttcaactcacagagttgaactttcatttacacagagcagatttgaaacactctttttgtggaatttgcaattggagatttcaagcgctttgaggccaaaggcagaaaaggaaatatcttcgtttcaaaactagacagaatcattcccagaaactgctcggcgatgtgtgctttccactctcagagtttaacttttcttttcattcagcagtttggaaacactctttttttaaagtctgcacgtggatattttgacctcttagagtccttcgttggaaacgggtttttttcctgtaaggctagacagaagaattcccagtaacttccttgtgttgtgtacattcaactcacagagttgaacgttcccttagacagagcagatttgaaacactctttttgtgcaattggcaaatggagatttcaagggctttaaggtcaatggcagaaaaggaaatatcttcgtttcaaaactagacagaatcattcccacaaactgcgttgtgatgtgttcgttcaactcacagagtttaacctttctgttcatagagcagttaggaaacactctgtttgtaaagtctgtaagtggatattctgacatcttgtggccttcgttggaaacggtatttcttcctcttctgctagacagaagaattctcagtaacttccttgtgttgtgtgtatttaactcacagagttgaacgatcctttacacagagcagacttgaaacactctttttgtggaatttgcaagtggagatttcagccgctttgaggtcaatggtagaaaaggaaactatcttcatataaagactagacagaatgattctcagaaactcctttgtgatgtgtgcgttcaactcacagagtttaaccttacttttcatagagcagttaggaaacactctgtttgtaaagtctgcaagtggatattcagacatctttgaggccttcgtttgaaacgggatttcttcatgttctgctagacagaagaattcccagtaacttccttgtgttgtgtgtgttcaactcacagagttgaactttcatttacacagagcagatttgaaacactctttttgtggaatttgcaaatggagatttcaagcgctttgaggccaaaggcagaaaaggaaatatgttcgtataaaaactagacagaatcattctcagaaactgctctgcgatgtgtgcgttcaactctcagagtttaacttttcttttcattcagtagtttggaaacactctgtttgtaaagtctgcacgtggataacttgaccacttagaggccttcgttggaaacgggtttttttcatgtaaggctagacagaagaattcccagtaacttccttgtgttgtgtgcattcaactcacagagttgaacgttcccttagacagagcagatttgaaaaactctatttgtgcaatttgcaagtgtagatttcaagcgctttaaggtcaacaggcagaaaaggaaatatcttcgtttcaaaactagacagaatgattctcagaaactcctttgtgatgtgtgcgttcaactcacagagttcaacctttcttttcatagagcagttgggaaacactctgtttgtaaagtctgcaagtggatattcaggcttctttgaggccttcgttggaagcgggatttcttcatattcagctagacagaagaattctcagtaactgccttgtgttgtgtgtattcaactcacagagttgaacgatcctttacacagagcagacctgaaacactctttttgtggaatttgcaagtggagatttcagccgctttgaggtcaatggtagaataggaaatatcttcctatagaaattagacagaatgattctcagaaactcctttgtgatgtgtgtgttcaactcacagagtttaacctttcttttcatagagcagttagtaaacactctgtttataaagtctgcaagtggatattcagacccctttgaggccttcgttggaaacggtatttcttcatattatgctagacagaagaattcccagtaacttccttgtgttgtgtgtgttcaactcacagagttgaactttcatttacacagagcagatttgaaacactctttttgtggaatttgcaagtggagatttcaagcgctttgaggccaaaggcagaaaaggaaatatctccgtttcaaaactagacagaatcattctcagaaactgctctgcgatgtgtgcgttcaactctcagagtttaacttttcttttcattcagcagttcggaaacactctgtttgtaaagtctgcacgtggatattttgaccacttagaggccttcgttggaaacgggtttttttcctgtaaggctagacagaagaattctcagtaacttccttgtgttgtgtgtattcaactcacagagttgaacaatcttttacacagagcagacttgaaacactctttttgtggaatttgcaaatggagatttcagccgctttgaagtcaaaggtagaaagggaaatatcgtcgtataaaaactagacagaatgattctcagaaactcctttgtgatgtgtgcgttcaactcacagagtttaacctttcttttcatagagcagttaggaaacactctgtttgtaaagtctgcaagtagatattcagacctctttgaggccttcgttggaaacgggtttttttcatataaggctagacagaagaattcccagtaacatccttgtgttgtgtgtattcaactcacagagttgaactttcatttacacagagcagatttgaaacactctttttgtggtatttgcaagtggagatttcagtcgctttgatgtgaatgatagaaaaggaaatatcttcgtataaaaactagacagaatgattctcataaactcctttgtgatgtgtgcgttcaactcaccgagtttaacctttcttttcatagagcagttaggaaacactctgtttgtaaagtctgcaagtggatattcagacctctttgaggcattcattggaaacgggatttcttcatattctgctagacagaagaattcccagtaacttccttgtgttgtgtgtgttcaactcacagagttgaactttcatttacacagagcagatttgaaacactctttttgtggaatttgcaagtggagatttcaagcgctttgaggccaaaggcagaaaaggaaatatcttcgtataaaaactcgacagaatcattctcagaaactgctctgcgatgtgtgcgttcaactctcagagtttaacttttcttttcattcagcagtttggaaacactctgtttgtaaagtctgcacgtggatattttgaccacttagaggccttcgttggaaacgggtttctttcctgtaaggctagacagaagaattcccagtaacttccttgtgttgtgtgcattcaactcacagagttgaacgttcccttagacagagcagatttgaaacactctatttgtgcaatttgcaagtgtagttttcaagctctttaaggtcaacggcagaaaaggaaatatcttggtttcaaaactagacagaatcattcccacaaactgcgttgtgatgtgttcattcaactcacagagtttaacctttctgttcatagagcagttaggaaacactctgtttgtaaagtctgtaagtggatattctgacatcttgtggccttcgttggaaacgggatttcttcatattatgctagacagaagaattctcagtaacttccttgtgttgtgtgtattcaactcacagagttgaacgatcctttacacagagcagacttgaaacactctttttgtgtaatttgcaagtggagatttcagccgctttgaggtcaatagtagaaaaggaaatatcttcatagaaaaactagacagaatgattctcagaaactcctttgtgatgtgtgcgttcaactcacagagtttaacctttctttttatagagcagttaggaaacactctctaaagtctgcaagtggatattcagacctccttgaggtcttcgttggaaacgggatttcttcatattatgctagacagaagaattctcagtaacttccttgtgttgtgtgtattcaactgacagagttgaactttcatttagagagagcagatttgaaacactgtttttgtggaatttgcaagtggagatttcaagcgctttggggccaaaggcagaaaaggaaatatcttcgtgtaaaaactacacagaatcattctcagaaactgctctgcgatgtgtgcgttcaactctcagagtttaacttttcttttcattcagaagtttggaaacactctgtttgtaaagtctgcacgtggataacttgaccacttagaggccttcgttggaaacgggtttttttcatgtaaggctagacagaagaattcccagtaacttccttgtgttgtgtgcattcaactcacagagttgaacgttcccttagacagagcagatttgaaacactctatttgtgcaatttgcaagtgtagttttcaagctctttaaggtcaacggcagaaaaggaaatatcttcgtttcaaagctagacagaatgattctcataaactcctttgtgatgtgtgcgttcaactcacagagtttaacttttcttttcatatagcagttaggaaacactctgtttgtaaagtctgaaagtggatattcagacctctttgaggccttcgttggaaatgggatttcttcatattatgctagacagaagaattctcagaatcttccttgtgttgtgtgtattcaactcacagagttgaacgatcctttacacagagcagacttgaaacactctttttgtggaatttgcaagtggagatttcagccgctttgaggtccatggtagaaaaggaaatatcttcggataaaaactagacagaatgattctcagaaactcctttgtgatgtgtgcgttgaactcacagagtttaacttttcttctcatagagcagttaggaaacactctgtttgtaaagtctgcaagtggatattcagacctccttgaggccttcggggaaaacgggatttcttcatattctgctagacagaagaattcccagtaacttccttgtgttgtgtgtgttcaactcacagagttgaactttcatttacacagagcagatttgaaacactctttttgtggaatttgcaagtggagatttcaatcgctttgaggccaaaggcagaaaaggaaatatcttcgtttcaaaactagacagaaatcattctcagaaactgctctgcgatgtgtgcgttcaactctcaggagtttaacttttcttttcattcagcagtttggaaacactctgtttgtaaagtctgcacgtggatattttgaccacttagaggccttcgttggaaacgggtttttttcctgtaaggctagacagaagaattcccagtaacttccttgcgttgtgtacattcaactcacagagttgaacgttcccttagacagagcagatttgaaacactctttttgtgcaattggcaagtggagatttcaagcgctttaaggtcaatggcagaaaaggaaatatcttcgtttcaaaactagacagaatgattctcagaaactcctttgtgatgtgtgcgttcaactcacagagtttaacctttcttttcatagagcagttaggaaacactctgtttgtaaagtctgcaagtggatattcagacctccttgaggccttcgttggaaacgggatttcttcatactatgctagacagaagaattctcagtaacttccttgtgttgtgtgtattcaactcacagagttgaacgatcctttacacagagcagacttgtaacactctttttgtggaatttgcaagtggagatttcagccgctttgaagtcaaaggtagaaaaggaaatatcttcctattaaaactagacagaatgattctcagaaactcctttgtgatgtgtgcgttcaactcacagagtttaacttttcttttcatagagcaattaggaaacactctgattgtaaagtcttcaagtggatattcagacctctttgaggccttcgttggaaacgggatttcttcatattctgctagacagaagaattctcagtaacttccttgtgttgtgtgtattcaactgacagagttgaactttcatttagagagagcagatttgaaacactgtttttgtggaatttgcaagtggagatttcaagcgctttggggccaaaggcagaaaaggaaatatcttcgtataaaaactagacagaatcattctcagaaactgctgcgtgatgtgtgcgttcaactctcagagtttaacttttcttttcattcagctgtttggaaacactctgtttgtaaagtctgcacgtggaaattttgaccacttagaggccttcgttggaaacgggattttttcatgtaaggctagacagaagaattcgcagtaacttccttgtgttgtgtacattcaactcacagagttgaacgttcccttagacagagcagatttgaaacagtctttttgtgcaattggcaagtggagatttcaagcgctttaaggtcaatggcagaaaaggaaatatcttcgtttcaaaactagacagaatgattctcagaaactcctttgtgatgtgtgcgttcaactcacagagtttaacctttcttttcatagagcagttaggaaacactctgtttgtaaagtctacaagtggatattcggacctccttgaggccttctttggaaacgggatatcttcttattatgctacacagaaaaattctcagtaacttccttgtgttgtgtgtattcaactcacagagttgaatgatcctttacacagagcagacttgaaacactctttttgtggaatttgcaagtggagatttcagccgctttgaggtcaatggtagaataggaaatatcttcctatagaaactagacagaatgattctcagaaactcctttgtgatgtgtgtgttcaactcacagagtttaacctttcttttcatagagcagttagtaaacactctgtttataaagtctgcaagtggatactcagacccctttgaggccttcgttggaaacgggatttcttcatattatgctagacagaagaattcccactaacttccttgtgttgtgtgtgttcaactcacaagagttgaactttcatttacacagagcagatttgaaacactctttttgtggaatttgcaagtggagatttcaagcgctttgaggccaaaggcagaaaaggaaatatcttcgtttcaaaactagacagaatcattctcagaaactgctctgcgatgtgtgcattcaactctcagagtttaatttttcttttcattcagcagtttggaaacactctctttgtaaagtctgcacgtggatattttgaccacttagaggccttcgttggaaacgggttttattcctgtaaggctagacagaagaattcccagtaacttccttgtgttgtgtacattcaactcacagagttgaacgttcccttagacagagcagatttgaaatactctttttgtgcaattgggaaatggagatttcaagcgctttaaggtcaatggcagaaaaggaaatatcttcgtttcaaaactagacagaatgattctcagaaagttctttgcgatgtgtgcgttcaactcacagagtttaacctttcttttcatacagcagttaggaaacactctgtaaactctgcaagtggatattcagacctctttgaggccttcgttggaaacgggatttcttcatactatgctagacagaagaattctcagtaactttccttgtgttgtgtgtattcaactcacagagttgaacgatcctttacacagagcagacttgtaacactctttttgtggaatttgcaagtggagatttcagccgctttgaagtcaaaggtagaaaaggaaatatcttcctataaaacgacatagacagaatgattctcagaaactcctttgtgatgtgtgcgttcaactcacagagtttaacctttcttttcatagagcagttaggaaacactctgtttgtaaagtctgcaagtggatattcagacatccttgaggctttcgttggaaacgggatttcttcatgttctgctagacagaagaattcccagtaacttccttgtgttgtgtgtgttgaactcacagagttgaactttcatttacacagagcagatttgaaacactctttttgtggaatttgcaaatggagatttcaagcgctttgaggaaaaaggcagaaaagggaatatcttcgtataaaaactagacagaatgattctcagaaactcctttgtgatgtgtgtgttcacctcacagagtttaacttttcttttcattcagcggtttggaaacactctgtttgtaaagtctgcacgtggatattttgaccacttagaggccttcgttggaaacgggtttttttcatgtaaggctagacagaataattcccagtaacttctttgtgttgtgtacattcaactcacagagttgaacgttcccttagacagagcagatttgaaacactctttttgtgaaattggcaagtggagatttcaagcgctttaaggtcagtggcagaaaaggaaatatcttcgtttcaaaactagacagaatcattcccacaaactgcgttgtgatggttcgttcaactcacagagtttaacctttcttttcatagagcagttaggaaacagtctgtttgtcaattctgtaagtggatattctgacatcttgtggccttcgttggaaacgggatttcttcatattctcctagacagaagaattctcagtaacttccttgtgttgtgtgtattcaactcacacagttgaacgattctttacacagagcagacttgtaacactctttttgtggaatttgcaagtggagatttcagccgctttgaagtcaaaggtggaaaaggaaatatcttcctataaaaactagacagaatgattctcagaaactcctttgtgatgtgtgcgttcaactcacagagtttaacctttcttttcatagagcagttaggaaacactctgtttgtaaagtctgcaactggataatcagacctctttgaggccttcgttggaaacgggatttcttcatattttgctagacagaagaattctcagtaacttcctcgtgttgtgtgtattcaactcacagagttgagcgacgctttacacagagcagacttgaaacactctttttgtggaatttgcaaatggagatttcagccgctttgaggtcaatggttgaaaaggaaatatcttcatataaaaatttgacagaatcattctcagaaactgctctgcgatgtgtgcgttcaactctcagagtttaacttttcttttcattcagcagtttggaaacactctgtttgtaaagcctgcacgtggatattttgaccacttagaggccttcgttggaaacgggtttttttcctgtaaggctagacagaagaattcccagtaacttccttgtgttgtgtgcattcaactcacagagttgaacgttcccttagacagagcagattggaaacactctacttgtgcaatttgcaagtgtagatttcaagcgctttaaggtcaatggcagaaaaggaaatatcttcgtttcaaaactagacagaatcattcccacaaactgcgttgtgatgtgttcgttcaactcacagagtttaacctttctgttcatagagcagttaggaaacactctgtttgtaaagtctgtaagtggatattctgacatcttgtggcgttcgttggaaacgggatttcttcatattctgctagagagaagaattctcagtaacttccttgtgttgtgtgtattcaactcacagagttgaatgatgctttacacagaacagacttgaaacactcttgttgtggaattttaaagtggagatttcagccgctttgaggtcaacggtagaataggtaatatcttcctatagaaactagacagaatgactctcagaaactcctttgtgatgtgtgcgttcaactcacagagtttaacctttcttttcatagagcagttaggaaacactctgtttgtaatgtctgcaagtggatattcagacctctttgaggccttcgttggaaacgggatttcttcatattatgctagacagaagaattcccagtaacttccttttgttgtgtgtgttcaactcacagagttgaactttgatttacacagagcagatttgaaacactctttttgtggaatttgcaagtggagatttcaagcgctttgaggccaaaggcagaaaaggaaatatcttcgtataaaaactagacagaatgattctcagaaactcctttgtgatgtgtgcgatcaactcacagagtttaacctttcttttcatagagcagttaggaaacactctgtttgtaaagtctgcaagtggatattcagacctctttgaggccttcgttggaaacgggtttttttcatataaggctagacagaagaattcccagtaactttccttgtgttgtgtgcgttcaactcacagagttgaactttcatttacacagagcagatttgaaacactctttttgtggaatttgcaaatggagatttcaagcgctttgaggccaaaggcagaaaaggaaatgtacttcgtttcaaaactagacagagtgattctcatcaactcctttgtgatgtgtgcgttcaactcacagagtttaacctttcttttcatagagcagttaggaaacactctgtttgtaaagtctgcaagtggatattcagacctccttgaggccttctttggaaacgggatttcttcatattctgatagacagaagaattctcagtaacttccttgtgttgtgtgtattcaactcacagagttgaacgatcctttacacagagcagacttgaaacacactttttatggaatttgcaagtggagatttcagccgctttgaggtcaaaggtagaaaaggaaactatgttcgtataaagagtagacagaatgattctcagaaaatcctttgtgatgtgtgcgttcaactcacagagtttaacttttcttttcatagagcagttaggaaacactctgtttgtaaagtctgcaagtggatattcagacctctttgaggccttcgttggaaacgggatttcttcatattatgctagacagaagaattctcagtaacttccttgtgttgtgtgtattcaactgacagagttgaactttcatttagagagagcagatttgaagcactgtttttgtggaatttgcaagtggagacttcaagtgctttggggccaaaggcagaaaaggaaataccttcgtataaaaactagacagaatcattctccgaaactgctctgcgatgtgtgccttcagcgctcagagtttaacttttcttttcattcagcagtttggaaacactctgtttgtaaagtctgcacgtggatattttgaccacttagaggccttcgttggaaacgggtttttgtcatgtaaggctagacagaagaattcccagtaacttccttgtgttgtgtgcattcaactcacagagttgaacgttcccttagacagagcagatttgaaacactctatttgtgcaatttgcaagtgtagttttcaagctctttaaggtcaacggcagaaaaggaaatatcttcgtttcaaaactagacagaatcattcccacaaactgcgttgtgatgtgttcgttcaactcacagagtttaacctttccgttcatagagcagttaggaaacactctgtttgtaaagtctgtaagtggatattctgacatcttgtggccatcgttggaaacgggatttcttcatattctgctagacagaagaattctcagtaacttccttgtgttgtgtgtattcaactcacagagttgaacgatcctttacacagagcagacttgaaacactctttttgtggaatttgcaagtggagatttcagccgatttgaggtcaatggtagaaaaggaaatatcttcgtagaaaaactagacagaatgattctcagaaactcctttgtgatgtgtgcgttcaaatcacagagtttaacttttcttttcatagagcagttaggaaacactctgtttgtaaagtctgcaagtggatattcagacctctttgaggccttcgttggaaacgggatttcttcatattatgctagacaggaaaattcccagtaacttccttgtgttgtgtgtgttcaactcacagagttgaactttcatttacacagagcagatttgaaacactctttttgtggaatttgcaagtggagatttcaagcgctttgaggccaaaggcagaaaaggaaatatcttcgtataaaaactagacagaatcattctcagcaactgctgcgtgatgtgtgcgttcaactctcagagtttaccttttcttttcattcagcggtttggaaacactatgtttgtaaagtctgcacgtggatattttgaccacttagaggccttcgttggaaacgggattttttcatctaaggctagacagaagaattcccagtaacttccttgtgttgtgtgcattcaactcacagagttgaacgttcccttagacagagcagatttgaaacactctatttgtgcaattggcaactgtagatttcaagcgtttaaggtcaatggcagaaaaggaaatatcttcgtttcaaaactagacagaatgattctcagaaactcctttgtgatgtgtgcgttcaactcacagagtttaacctttcttttcatagagcagttaggaaacactctgtttgtaaagtctgcaagtggatattcagacatctttgaggctatagttggaaacgggatttcttcatgttctgctagacagaagaattctcagaaacttccttgtgttgtgtgttttcaactcacagagttgaacgatgatttacacagagtagacttgaaacactctttttgtgtaatttgcaagtggagatttcagccgctttgaggtcaatggtagaaaaggaaatatcttcgtataaaaactagacagaatgattctcagaaactcctttgtgatgtgtgcgttcaactcacagagtttaacctttcttttcatagagcagttaggaaacactctgtttgtaaagtctgcaagtggatattcagacctctttgaggccttcgttggaagcgggatttcttcatgttcaggtagacagaagaattctcagtaacttccttgtgttgtgtgtattcaactcacagagttgaacgatcctttccacagagcagacttgaaacactctttttgtggaatttgcaagtggagatttcagccgctttgaggtcaatagtagaaaaggaaatatctttacagaaaaactagacagaatcattctcagaaactgctgcgtgatgtgtgcgttcaactctcagagtttaacttttctttacattcagcggtttggaaacactctgtttgtaaagtctgcacgtggatattttgaccacttagaggccttcgttggaaacgggattttttcatgtaaggctagacagaagaattcccagtaacttccttgtgttgtgtacattcaactcacagagttgaaagttcccttagacagagcagatttgaaacactctttttgtgcaattggcaagtggagatttcaagcgctttaaggtcaatggcagaaaaggaaatatcttcgtttcaaaactagacagaatcattcccacaaactgcgttgtgatgtgttctttcaactcacagagtttaacctttcttttcatagagcagttaggaaacagtctgtttgtaaattctgtaagtagatattctgacatcttgtggccttcgttggaaacgggatttcttcatattctgctagacagaagaattctcagtaacttccttgtgttgtgtgtattcaactcaccgagttgaacgatcctttacacagagcagacttgaaacactctttttgtggaatttgcaagtggagatttcagccgctttgaggtcaatggcagaaaaggaaatatcttcctatagaaactagacagaatgattctcagaaaatcttttgtgatgtgtgcgttcaactcacagagtttaacttttcttctcatagagcagttaggaaagactctgtttgtaaagtctgcaagtggatattcagacctctttgaggtcttcgttggaaacgggatttcttcatattatgctagacagaagaattcccagtaacttccttgagttgtgtgtattgaactcacagagttgaactttcatttacacagagcagatttgaaacactctttttgtggtatttgcaagtggagatttcagcggctttggtgtcaatgatagaaaaggaaatatcttcgtataaaaactagacagaatcattctcagaaactgctgcgtgatgtgtgcgttcaactctcagagtttaacttttcttttcagtcagcggtttggaaacactctgtttgtgaagtctgcacgtggatattttgaccacttagaggccttcgttggaaacgggttttttgcatgtaaggctagacagaagaattcccagtaacttccttgtgttgtgtgtattcaactcacagagttgaacgatcttttacacagagcagacttgaaacactctatttgtgcaatttgcaagtgtagatttcaagcgctttaaggtcaatggcagaaaaggaaatatcttcgtttcaaaactagacagaatcattctcagaaactgctctgtgatgtgtgcgttcaactctcagagttaaacttttcttttcattcagcagtttggaaacactctgtttgtaaagtctgcacgtggataatttgaccacttagaggccttcgttggaaacgggtttttttcatgtaaggctagacagaagagttctcagtaacttccttgtgttgtgtgtattcaactcacacagttgaacgatcctttacagagagcagacttgtaacactctttttgtggaatttgcaagtggagatttcagccgctttgaagtcaaagtagaaaaggaaatatcttcctataaaaactagacagaatgattctcagaaactcctttgtgctgtgtgcgttcaactcacagagtttaacctttcttttcatagagcagttaggaaacactctgtttgttaagtctgcaggtggatattcagacctctttgaggccttcgttggaagcgggatttcttcatattatgctagacagaagaattcccagtaacttccttgtgttgtgtgtgttcaactcacagagttgaactttgatttacacagagcagatttgaaacactctttttgtggaatttgcaagtggagatttcaagcgctttgaggccaaaggcagaaaaggaaatatcttcgtataaaaactggacagaatcattctcagaaactgctctgcgatgtgtgcgttcaactctcagagtttaacttttcttttcattcagcagtttggaaacactctgtttgtaaagtctgcacgtggataacttgaccagttagaggccttcgatggaaacgggtttttttcatgtaaggctagacagaagaattcccagtaacttccttgtgttgtgtgcattcaactcacagagttgaacgttcccttcgacagagcagatttgaaacactctatttgtgcaatttgcaagtgtagatttcaagcgctttaaggtcaacggcagaaaaggaaatatcttcgtttcaaaactagacagaatgattctcagaaactcctttgtgatgtgtgcgttcaactcacagagtttaacctttcttttcatagagcagttaggaaacactctgtttgtaaagtctgcaagtggatattcagaaatctttcaggctttcgttggaaaagggatttcttcatattctgctagacagaagaattctcagaaagttcgttgtgttgtgtgttttcaactcacagagttcaacgatcctttacacagagtagacttgaaacaccctttttgtggaattggcagggtggagatttcagccgctttgaggtcaatggtagaataggaaatatcttcgtataaaaactagacagaatgattatcagaaactcctttgtgatgtgtgcgttcaactcacagagtttaacctttcttttcatagagcagttaggaaacactctgtttgtaaagtctgcaagtggatattcagacctccttgaggccttcgttggaaacgggatttcttcatattatgctagacagaagaattcccagtaacttccttgtgttgtgtgtgttcaacacacagagttgaactttcatttacccagagcagatttgaaacactctttttgtggaatttgcaagtggagatttcaagcgctttgaggccaaaggcagaaaaggaaatatcttcgtttcaaaactagacagaatcattctcagaaactgctgcgtgatatgtgcgttcaactctcagagtttaacttttcttttcattcagcggtttggaaacactctgtttgtaaagtctgcacgtggatattttgaccacttagaggccttcgttggaaacgggtttttttcatgtaaggctagacagaagaattcccagtaacttccttgtgtggggtgcattcaactcacagagttgaacgttctcttagacagagcagatttgaaacactctatttgtgcaatttgcaagagtagatttcaagcgctttaaggtcaatggcagaaaaggaaatatcttcgtttcaaaactagacagaaatcattcccacaaactgcgttgtgatgtgttcgttcaactcacagagtttaacctttcttttcatagagcagttaggaaacagtctgtttgtaaattctgtaagtggatattctgacatcttgtggccttcgttggaaacgggatttcttcatattctgctagacagaagaattctcagtaacttccttgtgttgtgtgtattcaactcacagagttgaacgatcctttacacagagcagacttgaaacactctttttgtggaatttgcaagtggaggtttcagccgctttgaggtcaatagtagaaaaggaaatatcttcctagaaaaactagacagaatgattctcagaaactcctttgtgatgtgtgcgttcaactcacacagtttaacctttcttttcatagagcagttaggaaacactctgtttgtaaagtctgcaagtggatattcagacctccttgaggcattcgttggaaacgggatttcttcatattctgctagacagaagaattctcagtaacttccttgtgttgtgtgtattcaactcacagagttgaacgatcctttacacagagcagacttgaaacactctttttgtggaatttgcaagtggagatttcagccgctttgagttcaatggtagaataggaaatatcttcatatagaaactagacagaatcattctcagaaactgctctgcgatgtgtgcgttcaactctcagagtttaacttttcttttcattcagcagtttggaaacactctgtttgtaaagtctgcacgtgcataatttgaccacttagaggccttcgttggaaacgggtttttttcatgtaaggctagacagaagaattctcagtaacttccttgtgttgtgtgtattcaactcacagagttgaacgatcctttacacagagcagacttgtaacactctttttgtggaatttgcaagtggagatttcagccgctttgaagtcaaaggtagaaaaggaaatatcttgctataaaaactagacagaatcattcccacaaactgctttgtgatgtgttggttcaactcacagagtttatcctttctgttcatagagcagttaggaaacactctgtttgtaaagtctgtaagtggttataatgatatcttgtggccttcgttggaaacgggatttcttcatattctgctagacagaataattctcagtaacttccttgtgttgtgtgtattcaactcacagagttgaacgatcctttacacagagcagacttgaaacactctttttgtggaatttgcaactggagatttcagccgctttgaggtcaatggtagaataggaaatatcttcctatagaaactagacagaatgattctcagaaactcctttgtgatgtgtgcgttcaactcacagagttcaacctttcttttcatagagcagttgggaaacactctgtttgtaaagtctgcaagtggatattcagacttctttgaggccttcgttggaagcggggtttcttcatgttctgctagacagaagaattcccagtaacttccctgtgttgtgtgtgttcaactcacagagttgaactttcatttacacagagcagatttgaaacactctttttgtggaatttgcaaatggagatttcaagcgctttgaggccaaaggcagaaaaggaaatatcttcgtttcaaaactagacagaatcattctcagtaaactgctgcgtgatgtgtgcgttcaactctcagagtttaacttttcttttcattcagcggtttggaaaccctctgtttgtaaagtctgcacgtggatattttgaccacttagaggccttcgttggaaacgggttttttttcatgtaaggctagacagaagaattcccagtaacttccttgttttgtgtacattcaactcacagagttgaacgttcccttagacagagcagatttgaaatactctttttgtgcaattggcaagtggagatttcaagcgctttaaggtcaatggcagaaaaggaaatatcttcgtttcaaaactagacagaatcattcccacaaactgcgttgtgatgtgttcgttcaactcacagagtttaacctttcttttcatagagcagttaggaaacagtctgtttgtaaattctgtaagtggatattctgacatcttgtgaccttcgttggaaacgggatttcttcatattctgctagacagaagaattctcagtaacttccttgtgttgtgtgtattcaactcacagagttgaacgatcctttacacagagcagacttgaaacactccttttgtggaatttgcaagtggagatttcagccgctttgaggtcaatggtagaacaggaaatatcttcctatagaaactagacagaatgattctcagaaactcctttgtgatgtgtgcgttcaactcacagagtttaacctttcttttcatagagcagttaggaaacactctgtttgtaaagtctgcaagtggatattcagacctccttgatggccttcgttggaaaagggatttcttcatattatgctagacagaagaattcccagtaacttctttgtgttgtgtgtgttcaactcacacagttgaactttcatttacacagagcagatttgaaacactctttttgtggaatttgcaagtggagatttcaagcgctttgaggccaaaggcagaaaaggaaatatcttcgtttcaaaactagacagaatcattctcagaaactgctgcgtgatgtgtgcgttcaactctcagagtttaacttttcttttcattcagcggtttcgaaactctctgtttgtaaagtctgcacgtggatattttgaccacttagaggccttcgttggaaacgagtttttttcatgtaaggctagacagaagaattcccagtaacttccttgtgttgtgtgcattcaactcacagagttgaacgttcccttagacagagcagatttgaaacactctatttgagcaatttgcaagtgtagatttcaagcgctttaaggtcaatggcagaaaaggaaatatcttcgtttcaaaactagacagaatcattcccacaaactgcgttgtgatgtgttcgttcaactcacagagtttaacctttcttttcatagagcagttaggaaacagtctgtttgtaaattctgtaagtggatattctgacatcttgtggccttcgttggaaacgggatctcttcatattctgctagacagaagaattctcagtaacttccttgtgttgtgtgtattcaactcacagagttgaacgatcctttacacagagcagaattgaaacattctttttgtggaatttgcaagtggagatttcagccgctttgaggtcaatggtagaataggaaatatcttcctatagaaactagacagaatgattctcagaaactcctttgtgatgtgtgtgttcaactcacagagtttaacctttcttttcatagagcagttaggaaacactctgtttgtaaagtcttcaagtggatattcagacctctttgaggccttcgttggaaacgggtttttttcatataaggctagacagaagaattcccagtaacttccttgtgttgtgtgtgttcaactcacagagttgaactttcatttacacagagcagatttgaaacactctttttgtggaatttgcaaatgcagatttcagccgcgttgaggtcaatggtagaaaaggaaatatcttcgtttcaaaactagacagaatcattctcagaaactgctctgcgatgtgtgcgttcaactctcagagtttaacttttcttttcattcagcagtgtggaaacactctgtttgtaaagtctgaaggtggatattttgaccacttagaggccttcgttggaaacgggtttttttcctgtaaggctagacagaagaattctcagtaacttccttgtgttgtgtacattcaactcacagagttgaacgttcccttagacagagcagatttgaaacactctttttgtgcaattggcaagtggagatttcaagcgctttaaggtcaatggcagaaaaggaaatatcttcgtttcaaaactagacagaatcattccaacaaactgcgttgtgatgtgttcgtttaactcacagagtttaacctttcttttcatagagcagttaggaaacagtctgtttgtaaattctgtaagtggatattctgacatcttgtggccttcgttggaaacgggatttcttcatattctgctagacagaagaattctcagaatcttccttgtgttgtgtgtattcaactcacagcagttgaacgatggtttacacagagcagatttgaaacactctttttgtggaatttgcaagtggagatttcagccgctttgaggtcaatggtagaaaaggaaatatcttcgtataaaaactagacagagagagattctcagaactcctttgtgatgtgtgcgttcaactcacagagttcaacctttcttttcatagagcagttgggaaacactctgtttgtaaagtctgcaagtggatattcagacttctttgaggccttcgttggaagcgggatttcttcatattctgctagacagagaattctcagtaacttccttgtgttttgtgtattcaactgacagagttgaagtttcatttagagagagcagatttgaaacactgtttttgtggaatttgcaagtggagatttcaagcgctttgggaccaaaggcagaaaaggaaatatcttcgtatataaactagacagaatcattctcagaaactgctgcgtgatgtgtgcgttcaactctcagagtttaacttttcttttcattcagccgtttggaaacactctgtttgtaaagtctgcacgtggaaattttgaccacttagaggccttcgttggaaacgggtttttttcatgtaaggctagacagaagaattcccagtaacttccttgtgttgtgtgcattcaactcacagagttgaacgttcccttagaccgagcagatttgaaacactctatttgtgcaatttgcaagtgtagttttcaagctctttaaggtcaacggcagaaaaggaaatatcttcgtttcaaaactagacagaatgattctcagaaactcctttgtgatgtgtgcgttccactcacagagttcaacctttcttttcatagagcagttgggaaacactctgtttgtaaagtctgcaagtggatattcagacttctttgaggccttcgttggaagcgggatttcttcatattctgctagacagaagaattctcagtaacttccttgtgttgtgtgtattcaactcacagagttgaatgatcctttacacagaacagacttgaaacactcttgttgtggaatttgcaagtggagatttcagccgctttgaggtcaacggtagaataggaaatatcttcctataaaaactagacagaatgattctcagaaactcctttgtgatgtgtgcgttcaactcacagagtttaacctttcttttcatagagcagttaggaaacactctgtttgtaaagtctgcaggtggatattcagacatctttgaggctttcgttggaaacggcatttcttcatattctgctatacagaagaattcccagtaacttccttgtgttgtgtgtgttgaactcacagagttgaactttcatttacacagagcagatttgaaaccctctttttgtggaatttgcaagtggagatttcaagcgctttgaggccaaaggcagaaaaggaaatatcttcgtttcaaaactagacagaatgattctcagaaactcctttgtgatgtgtgcgttcaactcacagagtttaacctttcttttcatagagcagttaggaaacactatgtttgtaaaatctgcacgtggatattttgaccacttagaggccttcgttggaaacgggttttttcatgtaagggtagacagaagaattcccagtaacttccttgtgttgtgtacattcaactcacagagttgaacgttcccttagacagagcagatttgaaacactctttttgtgcaattggcaaatggagatttcaagcgctttaaggtcaatggcagaaaagggaatatcttcgtttcaaaactagacagaatcattcccacaaactgcgttgtgatgtgttcgttcaactcacagagtttaacctttcttttcatagagcagttaggaaacactcagtttgtaaagtctgcaagtggatattcagacctctttgaggccttcgttggaaacgggatttcttcatactgtgctagacagaagaattctcagtaacttccttgtgttgtgtgtattcaactcacagagttgaacgatcctttacaaagagcagacttgtaacactctttttgtggaatttgcaagtggagatttcagccgctttgaagtcaaaggtagaaaaggaaatatcttcctataaaaactagacagaatgattctcagaaactcctttgtgatgtgtgcgttcaactcacagagtttaacctttcttttcatagagcagttaggaaacactctgtttgtaaagtctgcacgtggatatttggacttctttgaggccttcgttggaaacggggttttttcatgtaaggctagatagaagaattcccagtaacttccttgtgttgtgtgtcttcaactcacagagttgaactttcatttacacagagcagatttgaaacactctttttgtggaatttgcaaatggagatttcaagcgctttgaggccaaaggcagaaaaggaaatatcttcgtataaaaactagacagaatcattctcagaaactgctgcgtgatgtgtgcgttcaactctcagagtttaacttttcttttcattcagcggtttggaaacactctgtttgtaaagtctgcacgtggatattttgaccacttagaagccttcgttggaaacgggttttttcatgtaaggctagacagaagaattcccagtaacttccttgtgttgtgtgcattcaactcacagagttgaacgttcccttagacagagcagatttgaaacactctatttgtgcaatttgcaagtgtagatttcaagcgctttaaggtcaaaggcagaaaaggaaatatcttcgtttcaaaactagacagaatgattctcagaaactcctttgtgatgtgtgtgttcaactcacagagtttaacctttctattcatagagtagttaggaaacactctgtttgtaaagtctgcaagtgggtattttgacctctttgagacctcctttggaaacgggtttttttcatgtaaggctagacagaagaattctcagtaacttccgcgtgttgtgtgtattcaactcacagagttgaacgatcctttacacagagcagacttgtaacactctttttgtggaatttgcaagtggagatttcagccgctttgaagtcaaaggtagaaaaggaaatatcttcctataaaaaatagacagaatgattctcagaaactcttttgtggtgtgtgcgttcaactcacagagtttaacctttctgttcatagagcagttaggaaacactctgtttgtaaagtctgcaagtggatattcagacctccttgaggccttcgttggaaaccggatttcttcatattctgctagacagaagaattctcagtaatttccttgtgttgtgtgtattcagctgacagagttgaactttcatttagagagagcagatttgaaacactgtttttgtggaatttgcaagtggatatttcaagcgatttgaggccaaaagcagaaaaggaaatatcttcgtataaaaactagacagaatcattctcagtaaactgctctgcgatgtgtgcgttcaactctcagagtttaacttttcttttcattcagcagtttggaaacactctgtttgtaaagtctgcacgtggatattttgaccatttagaggccttcgttggaaacgggtttttttcttgtaaggctagacagaagaattctcagtaacttccttgtgttgtgtgtattcaactcacagagttgaatgatcctctacacagagtagacttgaaacactctttttgtgtaatttgcaagtggagatttcagccgctttgaggtcaatggtagaaaaggaaatatcttcgtataaaaactagacagaatgattatgagaaactcctttgtgatgtgtgcgttcaactcacagagtttaacctttcttttcatagagcagttaggaaacactctgtttgtaaagtctgcaagtggatattcagacctccttgaggccttcgttggaaacgggatttcttcatattatgctagacagaagaattctcagtaacttccttgtgttgtgtgtattcaactcacagagttgaacgatcctttacacagagcagacttgaaacactctttttgtggaatttgcaagtggagacttcagccgctttgaggtcaatggtagaataggaaatatcttcctatagaaactagacagaatgattctcagaaactcctttgtgatgtgtgcgttcaactcacacagtttaacctttcttttcatagagcagttaggaaacactctgtttgtaaagtctgcaagtggatattcagacctccttgatccattcgttggaaatgggaattcttcatattatgctagacagaagaattctcagtaacttccttttgttgtgtgtattcaactgacagagttgaactttcatttagagagagcagatttgaaacactgtttttgtgcaatttgcaagtggagatttcaagcgctttggggcaaaaggcaggaaaggaaatatcttcgtataaaaactagacagaatcattctcagaaaccgctctgtgatgtgtgcgttcaactctcagagtttaacttttcttttcattcagcagtttggaaacactctgtttgtaaagtctccacgtggatattttgaccacttagaagccttcgttggaaacgagttttttttcatgtaaggctagacagaagaattcccagtaacttccttgtgttgtgtgcattcaactcacagagttgaacgttcccttagacagagcagatttgaaacactctatttgtgcaacttgcaagtgtagatttcaagcgctttaagctcaatggcagaaaaggaaatatcttcgtttcaaaactagacagaatcatttccacaaactgcgttgtgatgtgttccttcaactcacagagtttaacctttcttttcatagagcagttaggaaacactctgtttgtaaactctgcaagtggatattcagacctctttgaggccttcgttggaaacgggatttcttcatactatgctagacagaagaattctcagtaacttccttgtgttgtgtgtattcaactcacagagttgaacgatcctttatacagagcagacttgaaacactctttttgtggaatttgcaagtggagatttcagccgcgttgaggtcaatggtagaaaaggaaatatcttcgtataaaaactagacagaatgattctcagaaaatcttttgtgatgtgtgcgctcaactcacagagtttaacttttcttctcatagagcagttaggaaacactctgtttgtaaagtgtgcaagtggatattcagacctctttgaggccttcgttggaaacgggatttcttcatattatgctagacagaagaattctcagtaacttccttgtgttgtgtgtattcaactgacagagttgaactttcatttagagagagcagatttgaaacactgtttttgtggaatttgcaagtggagatttcaagcgctttggggccaaaggcagcaaaggaaatatcttcgtataaaaactagacagaatcattctcagaaactgctgcgtgatgtgtgcgttcaactctcagagtttaacttttcttttgattcagcggtttggaaacactctgtttgtaaagtctgcacgtggatattttgaccacttagaggccttcgttggaaacgggtttttttcatgtaaggctagacagaagaattcccagtaacttccttgtgttgtgtacattcaactcccagagttgaacgttcccttagacagagcagatttgaaacactctttttgtgcaattggcaagtggtgatttcagccgctttggggtcaatggtagaaaaggtaatatcttcgtataaaaactagacagaatcattcccacaaactgcgttgtgatgtgttcgttcaactcacagagtttaacctttctgttcacagagcagttaggaaacactctgtttgtaaagtctgtaagtggatattctgacatcttgtggccttcgttggaaacgggatttcttcatattctgctagacagaagaattctcagtaacttccttctgttgtgtgtattcaactcacagagttgaacgatcctttacacagagcagtcttgaaacactctttttgtggaatttgcaagtggagatttcagccgctttgtggtcaatggtagaataggaaatatcttcctatagaaactagacagaatgattctcagaaactcctttgtgatgtgggcgttcaactcacagagtttaacctttcttttcatagagcagttaggaaacactctgtttgtaaagtctgcatgtggatatttggacttctttgaggccttcgttggaaacgggtttttttcatgtaaggctagacagaagaattcccagtaacttccttctgttgtgtgtgttcgactcacagagttgaactttcatttacacagagcagatttgaaacactctttttgtggaatttgcaagtggagatttcaagcgctttgaggccaaaggcagaaaaggaaatatcttcgtttcaaaactagacagaatcattctcagaaactgctgcgtgatgtgtgcgttcaactctcagagtttaacttgtcttttcattcagcggtttggaaacactctgtttgtaaagtctgcacgtggatattttgaccacttagaggccttcgttggaaacgggtttttttcatgtaaggctagacagaagaattcccagtaacttccttgtgttgtgtgcattcaagtcacagagttgaacgtttccttagacagagcagaattgaaacactctatttgtgcaatttgcaagtgtagatttcaagcgctttaaggtcaatggcagaaaaggaaatatcttcgtttcaaaactagacagaatcattcccacaaactgcgttgtgatgtgttcgttcaactcacagagtttaaccttccttttcatagagcagttaggaaacagtctgtttgtaaattctgtaagtggatattctgacatacttgtggccttcgttggaaacgggatttcttcatattctgctagacagagagattctcagtaacttccttgtgttgtgtgtattcaactcacagagttgcacgatcctttacacagagcagacttgaaacactctttttgtggaatttgcaagtggagatttcagccgcgttgaggtcaatggtagaagaggaaatatcttcgtataaaaactagacagaatgattctcataaactcctttgtgatgtgtgcgttcaactcacagagtttaacctttcttttcatagagcagttaggaaacactctgtttgtaaagtctgcaagtggatattcagacccctttgaggccttcgttggaaacgggatttcttcatattctgccagacaaaagaattcccagtaacttccttgtgttgtgtgtgttcaactcacagagttgaactttgatttacacagagcagatttgaaacactctttttgtggaatttgcaaatggagatttcaagcgctttgaggccaaaggcagaaaaggaaatatcttcgtataaaaactagacagaatcattctcagaaactgctctgcgatgtgtgcgttcaactctcagagtttaacttttcttttcattcagcagtttggaaacactctgtttgtaaagtctgcacgtggatattttgaccacttagaggtcttcgttggaaacgggtttttttcctgtaaggctagacagaagaattcccagtaacttccttgtgttgtgtgcattcaactcacagagttgaacgttcccttagacagagcagatttgaaacactctatttgtgcaatttgcaagtgtagttttcacgctctttaaggtcaacggcagaaaaggaaatatcttcgtttcaaaactagacagaatcattcccacaaactgcgttgtgatgtgtgcgttcaactcacagagtttaacttttcttttcatagagcagttaggaaacactctgtttgtaaagtctgcaagtggatattcagacctctttgaggccttcgttggaaacgggatttcttcatattctgctagacagaagaattctcagtaacttccttgtgttgtgtgtattcaactcacagagttgaacgatcctttacacagagcagacttgaaacactctttgtgtggaatttgcaagtggagatttcagccgctttgaggtgaatggtagaaaaggaaatatcttcgtataaagactagacagaatgattctcagaaactcctttgtgatgtgtgcgttcaactcacagagttcaacctttcttttcatagagcagttgggaaacactctttttgtaaagtctgcaagtggatattcagacttctttgaggccttcgttggaagcgggatttcttcatattctgctagacagaagaattcccagtaacttccttgtgttgtgtgtgttcaactcacagagttgaactttcatttacacagagcagatttgaaacactctttttgtggaatttgcaagtggagatttcaagcgctttgaggccaaggcagaaaaggaaatatcttcgtataaaaactagacagaatcattctcagaaactgctctgcgatgtgtgtgttcacctctcagagtttaacttttcttttccttcagcagtttggaaacactctgtttgtaaagtctgcacgtggataatttgaccacttagaggccttcgttggaaacgggtttttttcatgtaaggctagacagaagaattcccagtaacttccttgtgttgtgtacattcaactcacagagttgaacgttcccttagacagagcagatttgaaacactctttttgtgcaattggcaagtggagatttcaagcgctttaaggtcaatggcagaaaaggaaatatcttcgtttcaaaactaggcagaatgattctcagaaacttcattgtgatgtgtgcgttcaactcacagagtttaacctttcttttcatagagcagttaggaaacactctgtttgtaaactctgcaagtggatattctgacctcattgaggccttcgatggaaacgggatttcttcatactatgctagacagaagaattcacagtaacttccttgtgttgtgtgtattcaactcacagagttgaacgatcctttacacagagcagacttgaaacactctttttgtggaatttgcaagtggagatttcagccgctttgaggtcaatggtagaaaaggaaatatcttcgtataaaaactagacagaatgattctcagaaactcctttgtgatgtgtgcgttcaactcacagagtttaacctttcttttcatagagcagttaggaaacactctgtttttatagtctgcaagtggatattcagacatctttgaggccttcgttggaagcgggatttcttcatattctgctatacagaagaattctcagtaacttccttgtgttgtgtgtattcaactgacagagttgaactttcatttagagagagcagatttgaaacactgtttttgtggaatttgcaagtggagatttcaaacgctttggggccaaaggcagaaaaggaaatgtcttcgtataaaaactagacagaatcattctcagaaactgctctgcgatgtgtgtgttcaactctcagagtttaacttttcttttcattcagcagtttggaaacactctgtttgtaaagtctgcacgtggatattttgaccacttagaggccttcgttggaaacgggtttttttcttgtaaggctagacagaagaattcctagtaacttccttgtgttgtgtacattcaactcacagagttgaacgttcccttagacagagcagatttgaaacactctttttgtgcaattggcaagtggtgatttcagccgctttgaggtcaatggtataaaaggaaatatcttcgtattaaaactagacagaatcattcccacaaactgcgttgtgatgtgttcgttcaactcacagagtttaacctttctgttcatagagcagttaggaaacactctgtttgtaaagtctgtaagtggatattgtgacatcttgtggccttcgttggaaacgggatttcttcatattctgctagacagaagaattctcagtaacttccttgtgttgtgtgtattcaactcacagagttgaatgatcctttacacagaacagtcttgaaacactctttttgtggaatttacaagtggagatttcagccgctttgaggtcaatggtagaataggaaatatctgcctatagaaactagacagaatgattctcagaaactcctttgtgatgtgtgcgttcaacacacagagtttaacttttcttttcatagagcagttaggaaacactctgtttgtaaggtctgcaagtggatattcagacctctttgaggccttcgttggaaacgggatttcttcatattctgctagacagaagaattctcagtaacttccctgtgttctgtgtattcaactcagagagttgaacgatcctttacagagagcagacttgaaacactctttttgtggaatttgcaagtggagatttcagccgctttgaggtcaatggtagaaaaggaaatatcttcgtataaagactagacagaatcattctcagaaactgctctgcgatgtgtgcgttcaactctcagagtttaacttttcttttcattcagcagtttggaaacactctgtttgtaaagtctgcacatggatattttgaccacttagaggccttcgttggaaacgggtttactttacctgtaaggctagacagaagaattcccagtaacttccttgcgttgtgtacattcaactcacagagttgaacgttcccttagacagagcagatttgaaacactctttttgtgcaattggcaagtggagatttcaagcgctttaaggtcaatggcagaaaaggaaatatcttcgtttcaaaactagacagaatcattcccacaaactgcgttgtgatgtgttcgttcaactcacagagtttaacctttctgttcatagagcagttaggaaacactctgtttgtaaactctgtaagtggatattctgacatcttgtggccttcgttggaaacgggatttcttcacattctgctagacagaggaattctcagaaacttccttgtgttgtgtgtattcaactcacagagttgaacgatcctttacacagagcagacttgaaacactctttttgtggaatttgcaagtggagatttcagccgctttgaggtcaatggtagaaaaggaaatatcttcgtataaaaacaagacagaatgattctcagaaactcctttgtgatgtgtgcgttgaactcacagagtttaacctttcttttcatagagcagttaggaaacactctgtttgtaaagtctgcaagtggatattcattcctctttgaggccttcgttggaaacgggatttcttcatattatgctagacagaagaattcccagtaacttccatgtgttgtgtgtgttcaactcacagagttgaactttcatttacacagagcagatttgaaacactctttttgtggaatttgcaaatggagatttcaagcgctttgaggccaaaggcagaaaaggaaatatcttcgtataaaaattagacagattcattctcagaaactgctctgcgatgtgtgcgttcaactctcagagtttaacttttcttttcattcagcagtttggaaacactctgtttgtaaagtctgcacgtggataatttgaccacttagaggtcttcgttggaaacgggtttttttcatgtaaggctagacagaagaattcccagtaacttccttgtgttgtgtgcattcaactcacagagttgaacgttcccttagacagagcagatttgaaacactctatttgtgcaatttgcaagtgtagatttcaagcgctttaaggtcaacggcagaaaaaggaaatatcttcgtttcaaaactagacagaacgattctcagtaaactcctttgtgatgtgtgcgttgaactcacagagtttaacctttcttttcatagagcagttaggaaacactctgtttgtaaagtctgcaagtggatattcagacctctttgaggccttcgttggaaacgggatttcttcatattctgctagacagaagaattctcagaatcttccttgtgttgtgtgtattcaactcacacagttgaacgatggtttacacagagcagatttgaaacactctttttgtggaatttgcaagtggagatttcagccgctttgaggtccatggtagaaaaggaaatatcttcgtataaaaactagacagaatgattctcagaaacttctttgtgatgtgtgcgttcaactcacagagtttaacctttcttttcatagagcatttaggaaacactctgtttgtaaactctgcaagtggatattcagacctgtttgaggccttcgttggaaacgggatttcttcatactatggtagacagaagaattctcagtaacttccttgtgttatgtgtattcaactgacagagttgaactttcatttagagagagcagatttgaaacactgtttttgtggaatttgcaagtggagatttcaagcgctttggggccaaaggcagaaaaggaaatatcttcgtataaaaactagacagaataattctcagaaactgctgcgtgatgtgtgcgttcaactctcagagtttaacttttcttttcattcagcggtttggaaacactctgtttgtaaagtctgcacgtggatattttgaccacttagaggccttcgttggaaacgggtttttttcatgtaaggctagacagaagaattcccagtaacttccttgtgttgtgtatgttcaactcacagagttgaactttcatttacacagagcagatttgaaacactctttttgtggaatttgcaaatggagatttcaagcactttgaggccaaaggcagaaaaggaaatgtcttcgtttcaaaactagacagaatcattcccacaaactgcgttgtgatgtgttcgttcaactcacagagtttaacctttctgttcatagagcagttaggaaacactctgtttgtaaagtctgtaagtggatattctgacatctagtggccttcgttggaaacgggatttcttcatattctgctggacagaataattctcagtaacttccttgtgttgtgtgtattcaactcacagagttgaacgatcctttacacggagcagacttgaaacattctttttgtggaatttgcaagttgagatttcagccgctttgaggtcaatggtagaataggaaatatcttcctatagaaactagacagaaagattctcagaaactcctttgtgatgtgtgtgttcaactcacagagtttaacctttcttttcatagagcagttagtaaacactctgtttataaagtctgcaagtggatattcagacccctttgaggccttcgttggaaacgggatttcttcatattatgctagacagaagaattctcagtaacttccttgtgttgtgtgtattccactcacagagttgaacgatcatttacacagagcagatttgagacactctttttgtggaatttgctaatggagatttcaagcgctttgaggccaaaggcagaaaaggaaatatcttcgtataaaaactagacagaatcattctcagaaactgctctgcgatgtgtgcgttcaactctcagagtttaacttttcttttcattcagcagtttggaaacactctgtttgtaaagtctgcacgtggataatttgaccacttacaggccttcattggaaacgggtttttttcctgtaaggctagacagaagaattcccagcaacttccttgtattgtgtgcattcaactcacagagttgaacgatcctttacacagagcagatttgaaacactctatttgtgcaatttgcaagtgtagatttcaagcgctttgaggtcaatggcagaaaaggaaatatcttcgtttcaaaactagacagaatcattcccacaaactgcgttgtgatgtgttcgttcaactcacagagtttaacctttctgttcatagagcagttaggaaacactctgtttgtaaagtctgtaagtggatattctgacatcttgtggccttcgttggaaacgggatttcttcatattatgctagaaagaagaattcccagtagcttccttgtgttgtgtgtattcaactcacagagttgaattttcatttacacagcacagatgtgaaacactcttgttgtggtatttgcaattggagatatcagccgctttgatgtcaatgatagaaaaggaaatatcttcgtataaaaactagacagaatgattctcagaaactcctttgtgatgtgtgcgttcaactcacagagtttaacctttcttttcatagagcagttaggaaacactctgtttgtaaagtctgcaagtggatattcagacctctttgaggccttcgttggaatcgggatttcttcatattatgctagacagaaggattcccagtaacttccttgtgttgtgtgtgttcaactgacagagttgaactttcatttacaaagagcagatttgaaacactctttttgtggaatttgcaattggagatttcaagcgctttgaggccaaaggcagaaaaggaaatatcttcgtataaaaactagacagaatcattctcagaaactactgtgtgatgtgtgcgttcaactctcagagtttaacttttcttttcattcagcagtttggaaacactctgtttgtaaagtctgaacgtggatattttgaccacttagaggccttcgttggaaacgggtttttttcctgtaaggctagacagaagaattctcagtaacttccttgtgttgtgtacattcaactcacagagttgaacgatcctttacacagagcagacttgtaacactctttttgtggaatttgcaagtggagatttcagccgctttgaagtcaaaggtagaaaatgaaatatcttcctataaaaactagacagaatgattctcagaaactcctttgtgatgtgtgcgttcaactcacagagttcaacctttcttttcatagagcagttgggaaacactctgtttgtaaagtctgcaagtggatattcagacttctttgaggccttcgttggaagcgggatttcttcatgttctgttagacagaagaattctcagtaacttccttgtgttgtgtgtattcaactcacagagttgaacgatcctttacacagagcagacttgaaagactctttttgtggaatttgcaagtggagatttcagccgctttgatgtcaatggtagaaaaggaaatatcttcgtataaagactagatagaatgattctcagaaactcctttgtgatgtgtgcgttcaactcacagagtttaacctttcttttcatagagcagttaggaaacactctgtttgtaaagtctgcaagtggatattcaggcatccttgaggctttcgttggaaacgggatttcttcatattctgctagaaagaagaattcccagtaacttccttgtgttgtgtgtgttcaactcacagagttgaactttcatttacacagagcagatttgaaacactctttttgtggaatttgcaagtggagatttcaagcgctttgaggccaaaggcagaaaagaaggaaatatcttcgtataaaaactagacagaatcattctcagaaactgctctgtgatgtgtgcgttcaactctcagagtttaacttttcttttcattcagcagtttggaaacactctgtttgtaaagtctgcacgtggataatttgaccacttagaggccttcgttggaaacgggtttttttcatgtaaggctagacagaagaattctcaggaacttccttgtgttgtgtgtattcaactcacagagttgtacgatcttttacacagagcagacttgaaacactctttttgtggaatttgcaagtggagatttcagccgctttgaagtcaaaggtacaaaaggaaatatcgtcgtaaaaaaactagacagaatcattcccacaaactgcgttgtgatgtgttcgttcaactcacagagtttaacctttctgttcatagagcagttaggaaacactctgtaacgtctgtaagtggatattctgacatcttgtggccttcgttggaaacgggatttcttcatattctgctagaaagaagaattctcagaatcttccttgtgttgtgtgtattcaactcaccgagttgaacgatcctttacacagagcagacttgaaacactctttttgtggaatttgcaagtggagatttcagccgctttgaggtccatgttagaaaaggaaatatcttcgtataaaaactagacagaatgattctcagaaactcctttgtgatgtgtgcgttcaactcacagagtttaacctttcttttcatagagcagttaggaaacactctgtttgtaaagtctgcaagtggatattcagacctctttgaggccttcgttggaaacgggtatttttcatataaggctagacagaagaattctcagtaacttccttgtgttgtgtgtatacaactcacagagttgaactttcatttagagagagcagatttgaaacactgtttttgtggaatttgcaagtggagatttcaagcgctttggggccaaaggcagaaaaggaaatatcttcgtataaaaactagacagaatcattctcagaaactgctctgcgatgtgtgcgttcaactctcagagtttaacttttcttttcattcaacagtttggaaacactctgtttgtaaagtctgcacgtggatattttgaccacttagaggccttcgttggaaacaggtttttttcatgtaaggctagacacaagaattcccagtaacttccttgtgttgtgtacattcaactcacagagttgaacgttcccttagacagagcagatttgaaacactctttttgtgcaattggcaagtggagatttcaagcgctttaaggtcaatggcagaaaaggaaatatcttcgtttctaaactagacagaatgattctcagaaactcctttgtgctgtgtgcgttcaactcacagagtttaacctttcttttcatagagcagttaggaaacactctgtttgtaaagtctgcaagtggatattcagacatctttgaggctttcgttggaaacgggatttcttcatattctgccagacagaagaattctcagaaacttccttgtgttgtgtgtattcaactcacagagttgaacgatcgtttacacagagcagacttgaagcactctttttgtggaatttgcaagtggagatttcagccgctttgaggtcaatggtagaaaaggaaatatcttcgtataaaaactagacagaatgattctcagaaactcctttgtgatgtgtgcgttcagctcacagagtttaacctttctgttcatagagcagttaggaaacactctgtttgtaaagtctgcaagtggatattcagacctccttgaggccttcgttggaaacgggatttcttcatattctgctagacagaagaattctcagtaacttccttgtgttgtgtgtagtcaactcacagagttgaacgatcctttacacagagcagacttgaaacattctttttgtggaatttgcaagtggagatttcagccgctttgaggtcaatggtagaataggaaatatcttcctatagaaactagacagaacgattctcagaaactcctttgtgatgtgtgcgttcaactcacagagtttaacttttcttttcatagagccgttaagaaacactctgtttgtaaagtctgcaagtggatattcagacctctttgaggccttcgttggaaacgggatttcttcctattctgctagacagaagaattctcagtcacttccttgtgttgtgtgtattcaactcacagagttgaacgatcctttacagagagcagacttcaaacactctttttgtggaatttgcaagtggagatttcagccgctttgaggtcaatagtagaaaaggaaatatcttcgtataaaaactagacagaatcattctcagaaactgctgcgtgatgtgtgcgttcaactctcagagtttaacttttcttttcattcagcggtttggaaacactctgtttgtaaagtctgcacgtggatattttgaccacttagaggccttcgttggaaacgggttttttttcatataaggctagacagaagaattcccagtaacttccttgtgttgtgtgcattcaactcacagagttgaacgttcccttagacagaggagatttgaaacactctatttgtgcaatttgcaagtgtagatttcaagcgctttaaagtcaatggcagaaaaggaaatatcttcgtttcaaaactagacagaatcattcccacaaactgcgttgtgatgtgttcgttcaactcacagagtttaacctttctgttcatagagcagttaggaaacactctgtttgtaaagtctgcaagtgaatattcagacctccttgaggccttcgttggaaacgggatttcttcatattctgctagaccgaagaattctcagtaacttccttgtgttgtgtgtattcaactcacagagttgaatgttcctttacacagagcagacttgaaacactctttttgtggaatttgcaagtggagatttcagccgctttgaggtcaatggtagaaaagtaaatatcttcgtatgaagactagacagaatgattctcagaaactcctttgtgatgtgtgcgttcaactcacagagttcaacctttcttttaatagagcagttgggaaacactctgtttgtaaagtctgcaagtggatattcagacttctttgaggccttcgttggaagcgggatttcttcatattctgctagacagaagaattctcagtaacctccttgtgttgtgtgtattcaactcacagtgttgaacgaccctttacacagagcagacttgaaacactctttttgtggaatttgcaagtggagatttcagccgctttgaggtcaatggtagaataggaaatatcttcctatagaaactagacagaatgattctcagaaactcctttgtgatgtgtgcgttcaactcacagagtttaacctttctgttcatagagcagttaggaaacactgtgtttgtaaagtctgcaagtggatattcagacctccttgagtccttcgttggaaacgggatttcttcatattctgctagacagaagaattcccagtaacttccttgtgttgtgtgcattcaactcacagagttgaacgttcccttagacagagcagatttgaaacactctatttgtccaatttgcaagtgtagatttcaagcgctttaaggtcaacggcagaaaaggaaatatcttcgtttcaaaactagacagaatcattcccacaaactgcgttgtgatgtgttcgttcaactcacagagtttaacctttctgttcatagagcagttaggaaacactctgtttttaaagtctgtaagtggatattctgacatcttgtggccatcgttggaaacgggatttcttcatattctgctagacagaagaattctcggtaacttccttgtgttgtgtgtattcaactcacagagttgaacgatcctttacacagagcagacttgaaacactctttttgtggaatttgcaagtggagatttcagccgctttgaggtcaatggtagaaaaggaaatatcttcgtatgaagactagacagaatgattctcagaaactcctttgtgatgtgtgcgttcaactcacagagtttaacttttcttttcatagagcagttagacaacactctgtttgtaaagtctgcaagtgaatattcagacctctttgaggccttcgttggaaacgggatttcttcatataatgctagacagaagaattctcagtaacttccttgtgttgtgtgtattcaactcacagagttgaacgatcctttacacagagcagacttgtaacactctttttgtggaatttgcaagtggagatttcagccgctttgaagtcaaaggtagaaaaggaaatatcttcctataaaaactagtcagaatgattctcagaaactgctttgtgatgtgtgcgttcaactcacagagtttaacctttcttttcatagagcagttaggaaacactctgtttgtaaagtctgcatgtggatattgagacttctttgaggccttcgttggaaacgggtttttttcatgtaaggctagacagaagaattctcagtaacttccttgtgttgtgtgtattcaactcacagagttgaactttcatttagagagagtagatttgaaacactgtttttgtggaatttgcaagtggagatttcaagcgctttggggccaaaggcagaaaaggaaatatcttcgtataaaaactagacagaatcattctcagaaactgctgcgtgatgtgtgcgttcaactctcagagtttaacttttcttttcattcagcggtttggaaacactctgtttgtaaagtctgcacgtggatattttgaccacttagaggccttcgttggaaacgagtttttttcatgtaaggctagacagaagcattcccagtaacttccttgtgttgtgtgcattcaactcacagagatgaacgttcccttagacagagaagatttgaaacactctatttgtgcaatttgcaagtgtagatttcaagcgctttaaggtcaatggcagaaaaggaaatatcttcgtttcaaaactagacagaatgattctcagaaaattctttgtgatgtgtgcgttcaactcacagagtttaacctttcttttcatagagcagttaggaaacactctgtttgtaaactctgcaagtggatattcagacctctttgaggccttcgttggaaacgggatttctacatactatgctagacagaagaattctcagtaacttccgcgtgttgtgtgtattcaactcacagagttgaacgatcctttacacagagcagacttgaaacactctttttgtggaatttgcaagtggagatttcagccgctttgaggtcaatggtagaaaaggaaatatcttcctataaaaactagacagaatgattctcagaaactcctttgtgatgtgtgcgttcaactcacagagttcaacctttcttttcatagagcagttaggaaacactctgtttataatgtctgcaattggatattcagacctctttgaggccttcgttgaaaacgggatttcttcatattctgctagacagaagaattcccagtaacttccttgtgttgtgtgtgttcaactcacagagttgaactttcatttacacagagcagatttgaaacactctttttgtggaatttgcaaatggagatttcaagcgctttgaggccaaacgcagaaatggaaatatcttcgtataaaaattagacagaatcattctcagaaactgctctgcgatgtgtgcgttcaactctcagagtttaacttttcttttcattcagcagtttggaaacactctgtttgtaaagtctgcacatggataatttgaccacttagaggccttcgttggaaacgggtttttttcatgtaaggctagacagaagaattcccagtaacttccttgtgttgtgtgcattcaactcatagagttgaacgttccttagagagagcagatttgaaacactctatttgtgcaatttgcaagtgtagatttcaagcgctttaaggtcaatggcagaaaaggaaatatcttcgtttcaaaactagacagaatgattctcagaaacttctttgtgatgtgtgcattcaactcacagagtttaacctttcttttcatagagcagttaggaaacactctgtttgtaaactctgcaagtggatattcagacctctttgaggccttcgttggaaacgggtttttttcatataaggctagacagaagaattcccagtaacttccttgtgttgtgtgtattcaactcacagagttgaacgatcctttacacagagcagacttgtaacactctttttgtggaatttgcaagtggagatttcagccgctttgaagtcaaaggtagaaaaggaaatatcttcctataaaaactagacagaatgattctcggaaactcctttgtgatgtgtgcgttcaactcacagagtttaacctttcttttcatagagcagttaggaaacactctgtttgtaaagtctgcaagtggatattcagacctctttgaggccttcgttggaaacgggatttcttcatattctgctagacagaagaattcccagtaacttccttgtgttgtgtgtgttcaactcacagagttgaactttcatttacacagagcaggtttgaaacactctttttgtggtatttgcaaatggagatttcaagcgctttgtggcgaaatgcagaaaaggaaatatcttcgtataaaaactagacagaatcattctcagaaactgctctgcgatgtgtgcgttcaactctcagagtttaacttttcttttcgttcagcagtttggaaacactctgtttgtaacgtctgcacgtgaataatttgaccacttagaggccttcgttggaaacgggtttttttcatgtaaggctagacagaagaattcccagtaacttccttgtgttgtgtacattcaactcacagagttgaacgttcccttagacagagcagatttgaaacactctttttgtgcaattggcaagtggagatttcaagcgctttgaggtcaatggcagaaaaggaaatatcttcgtttcaaaactagacagaatgattctcagaaactcctttgtgatgtgtgcgttcaactcacagagtttaacctttcttttcatagagcagttaggaaacactctgtttgtaaagtctgcaagtggatattcagacctccttgaggccttcgttggaagcgggatttcttcatattatgctagacagaataattctcagtaacttccttgtgttgtgtgtattcaactcacagagttgaacgatcatttacacagagcagacttgaaacactctttttgtggaatttgcaagtggagatttcagccgcttgaggtcaatggtagaaaaggaaactatcttcgtataaagactagacagaatgattttcagaaactcctttgtgatgtgtgcgttcaactcacagagtttaacctttcttttcatagagcagttaggaaacactctgtttgtaaagtctgcaagtggatattcagacctccttgaggccttctttggaaacgggatttcttcatattctgatagacagaagaattctcagtaacttccttttgtggtgtgtattcaactcacagagttgaatgatcctttacacagaacagtcttgaaacactctttttgtggaatttgcaagtggagatttcagccgctttgaggtcaatggtagaataggaaatatcttcctatagaaactagacagaattattctcagaaactcctttttgatatgggtgttcaactcaccgagtttaacctttcctttcatagagcagttaggaaacactctgtttgtaaagtctgcaagtggatatttccacctctttgaggccttcgttggaaacgggttttttttcatgtaattctagacagaagaattctcagtaacttccttgtgttgtgtgtattcaactgacagagttgaactttcatttagagagagcagatttgtaacactgtttttgtggaatttgcaagtggagatttcaagagctttggggccaaaggcagaaaaggaaatatcttcgtataaaaactagacagaatcattctcagaaactgcggcgtgatgtgtgcgttcaactctcagagtttaacttttcttttcattcagcggtttggaaacactctgtttgtaaagtctgcacgtggatattttgaccacttagaggccttcgttggaaacgggtttttctcatgtaaggctagacagaagaattcccagtaacttccttgtgttgtgtgcattcaactcacagagttgaacgttcccttagacagagcagatttgaaacactctatttgtgcaatttgcaagtgtagatttcaagcgctttatggtcaacggcagaaaaggaaatatcttcgtttcaaaactagacagaatgattctcagaaactgctttgtgatgtgtgcgttcaactcacagagttcaacctttcttttcatagagcagttgggaaacactctgtttgtaaagtctgcaagtggatattcagacatccttgaggctttcgttggaaacgggatttcttcatattctgccagaaagaagaattctcagaaacttcctggtgttgcgtgttttcaactcacagagttcaacgatcctttacacagagtagacttgaaaaactctttttgttgaattggccagtggagatttcagccgctttgaggtcaatggtagaaaaggaaatatcttcgtataaaaactagactgaatgattctcagaaactcctttgtgatgtgtgcgttcaactcgcagagtttaacctttcttttcatagagcagttaggaaacactctggttgtaaagtctgcaagtggatattcagacctcgttgaggccttcgttggaaacgggatttcttcatattatgctagacagaagaattcccagtaacttccttgtgttgtgtgtgttcaactcacagagttgaactttcatttacacagagcagatttgaaacactctttttgtggaatttgcaagtggagatttcaagcgctttgaggccaaaggcagaaaaggaaatatcttcgtttcaaaactacacagaatcattctcagaaactgctgcgtgatgtgtgcgatcaacactcagagtttaacttttcttttcattcagcggtttggaaacactctgtttgtgaagtctgcacgtggaaattttgacaacttagagaccttcgttggaaacgggattttttcatgtaaggctagacagaagaattcccagtaacttccttgtgttgtgtgcattcaactcacagagttgaacgttcccttagaccgagcagatttgaaacactctatttgtgcaatttgcaagtgtagttttcaagctctttaaggtcaacggcagaaaaggaaatatcttcgtttcaaaactatacagaatcattcccacaaactgcgttgtgatgtgttcgttcaactcacagagtttaacctttctgttcatagagcagttaggaaacactctgtgtgtaaagtctgcaagtggatattcagacctctttgaggccttcgttggaaacggtatttcttcatattatgctagacagaataattctcagtaacttccttgtgttgtgtgtattcaactcacagagttgaaggatcctttgcagagagcaggcttgaaacactctttttgtcgaatttgcaagtggagatttcagccgctttgaggtcaatggtagaataggaaatatcttcttatagaaactagacagaatgattctcagaaactcctttgtgatgtgtgagtacaactcacagagtttaacctttcttttcatagagcagttaggaaacactctgtttgtaaagtctgcaagtggatattcagacctctttgaggccttcgttggaaacgggtttttttcatgtaaggctagacagaagaattctcagtaacttccttgtgttgtgtgtattcaactgacagagttgaactttcatttagagagagcagatttgaaacactgtttttgtggaatttgcaagtggatatttcaagcgctttggggccaaaggcagaaaaggaaatatcttcgtataaaaactagacagaatcattctcagaaactgctctgtgatgtgtgcgttcaactctcagagtttaacttttcttttcattcagcagtttggaaacactctgtttgtaaagtctgcacgtggataatttgaccacttagaggccttcgttggaaacgggtttttttcatgtaaggctagacagaagaattcccagtaacttccttgtgttgtgtgcattcaactcacagagttgaacgttcccttagacagagcagatttgaaacactctatttgtgcaatttgcaagtgtagatttcaagcgcattaaggtcaatggcagaaaaggaaatatcttcgtttcaaaattagacagaaatcattcccacaaactgcgttgtgatgtgttcgttcaactcacagaagtttaacctttcttttcatagagcagttaggaaacagtctgtttgtaaattctgtaagtggatattctgacatcttgtggccttcgttggaaacgggatttcttcatattctgctagacagaacaattctcagtaacttccttttgttgtgtgctttcaactcacagagttgaacgatcctttacacagagcagattagaaacactctttttgtggaatttgcatgtggagatttcagccgctttgaggtcaatggtagaaaaggaaatatcttcgtataaaaactagacagaatgattctcagaaactcctttgtgatgtgtgtgttcaactcacagagtttaacctttcttttcatagagtagttaggaaacactctgtttgtaaagtctgcaattggatattcagacctcttagaggccttcgttggaaacgggatttcttcatattatgctagacagaagaattctcagtaacttccttgtgttgtgtgcattcatctcacagagttgaaagatcctttacacagagcagattagaaacaatatttttgtggattttgcaagtggagatttcagccactttgaggtcaatggtagaaaaggaaatatcttcgtataaaaactagagagaatcattctcagaaactgctctgcgatgtgtgcgttcaactctcagagtttaacttttcttttcattcagcagtttggaaacactctgtttgtaaagtctgcacgtggataacttgaccacttagaggccttcgttggaaacgggtttttttcctgtaaggctagacagaagaattcccagtaacttccttgtgttgtgtgcattcaactcacagagttgaacgttcccttagacagagcagatttgaaacactctatttgtccaatttgcaagtgtagatttcaagcgctttaaggtcaacggcagaaaaggaaatatcttcgtttcaaaactagacagaatcattcccacaaacttcgttgtgatgtgttcgttcaactcacagagtttaacgtttattttcatagagcagttaggaaacactctgtttgtaaactcttcaagtggatattcagacctctttgaggccttcgttggaaacgggatttcttcatattctgctagacagaagaattctcagtaacttccttgtgttgtgtgtattcaactcacagagttgaacgatcctttacacagagcacacttgaaacactctttttgtggaatttgcaagtggagatttcagccgctttgaggtcaatgggagaaaaggaaatatcttcgtataaagactagacagaatgattctcagaaactcctttgtgatgtgtgtgttcaactcacagagtttaacctttcttttcatagagcagttaggaaacactctgtaaagtctgaaagtggatattcagacctctttgaggccttcgttggaaacgggatttcttcatattctgctagacagaataattctcagtaacttccttgtgttgtgtgtattcaactgacagagttgaactttcatttagagagagcagatttgaaacactgtttgtgtggaatttgcaagtggagatttcaagcgctttggggccaaaggcagaaaaggtaatatcttcgtataaaaactagacagaatcattctcagaaactgctgcgtgatgtgtgcgttcaactctcagagtttaacttttcttttcattcagccgtttggaaacactctgtttgtaacgtctgcacgtggatattttgaccacttagaggccttcgttggaaacgggttttttgcatgtaaggctaaacagaagaattccccagtaacttccttgtgttgtgtgcattcaactcacagagttgaacgttcccttagacagagcagatttgaaacactctatttgtgcaatttgcaagtgtagatttcaagcgctttaaggtcaacggcagaaaaggaaatatcttcgtttcaaaactagacagaatcattcccacaaactgcgttgtgatgtgttcgttcaactcacagagtttaacctttcttttcatagagcagttaggaaacagtctgtttgtcaattctgtaagtggatattctgacatcttgtggccttcgttggaaacgggatttcttcatattctgctagacagaagaattctcagtaacttccttgtgttgtgtgtattcaactcacagagttgaacgatcctttacacagagcagacttgaaacactcttcttgtggaatttgcaagtggagatttcagtccgctttgaggtcaattgtagaataggaaatatcttcctatagaaactagacagaatgattctcagaaactcctttgtgatgtgtgcgttcaactcacagagtttaacctttcttttcatagagcagttaggaaacactctgtttgtaaagtctgcaagtggatattcagacctccttgaggccttcgttggaaacgggttttcttcatattatgctagacagaagaattctcagtaacttccttgtgttgtgtgtattcaactcacagagttgaacgatcctttacacagagcagacttgagacactctttttgtggaatttgcaagtggagatttcagccgctttgaggtcaatggtagaataggaaatatcttcctatagaaactagacagaatgattctcagaaactcctttgtgatgtgtgcgttcaactcacagagtttaacctttcttttcatagagcagttgggaaacactctgtttgtaaagtctgcaagtggatattcagacgtctttgaggccttcgttggaaacgggatttcttcatattctgctagacagaagaattcccagtaacttccttgtgttgtgtgcattcaacatcacagagttgaacgttcccttagacagagcagatttgaaacactatatttgtgcaatttgcaagtgtagatttcaagcgctttaaggtcaatggcgagaaaaggaaatatcttcgtttcaaaactagacagaatgattctcagaaactcctttgtgatgtgtgagttcaactcacagagtttaaccgttcttttcatagagcagttaggaaacactctgtttgtaaagtctgcaagtggatattcagacctctttgaggccttcgttggaaacgggatttcttcatattctgctagacagaagaattctcagtaacttccttgtgttgtgtgcattcaactcacagagttgaacgatcctttacacagggcagatttgaaacactctttttgtggaatttgcaagcggagatttcagcctctttgaggttaatggtagaaaatgaaatatcttcgtatagaaactagacagaatgattctcagaaactcctttgtgatgtgtgtgttcaactcacagagtttaacctttcttttcatagagcagtttggaaacactctgtttgtaaagtctgcaagtggatattcagacctctttgaggccttcgttggaaacgggtttttttcatataaggctagacagaagaattcccagtaacttccttgtgtgtgttcaactcacagagttgaactttcatttacacagagcagattggaaacactctttttgtggaatttgcaaagggagatttcaagagctttgaggccaaaggcagaaaaggaaatatcttcgtataaaaacgagacagaatcattctcagaaactgctgtgcgatgtgtgcgttcaactctcagagtttaacttttcttttcattcagcagtttggaaacactctgtttgtaaagtctgcacgtggataatttgaccacttagaggccttcgttggaaacgggtttttttcatgtaaggctagacagaagaattctcagtaacttccttgtgttgtgtgtattcaactcacagagttgaacgatcctttacacagagcagacttgaaacactctttttgtggaatttggaagtggagatttcagccgctttgagtgtcaatggtagaataggaaatatcttcctatagaaactagacagaatgattctcagaaactcctttgtgatgtgtgcgttcaactcacagagtttaacctttcttttcatagagcagttgggaaacactctgtttgtaaagtctgcatgtggatattcagacatccttgaggctttcgttggaaacgggatttcttcatattctgctagaaagaataattctcagtaacttccttgtgttgtgtgtattcaactcacagagttgaacgatcctttacagagagcagacttgaaacactctttttgtggaatttgcaagtggagatttcagccgctttgaggtcaaaggtagaataggaaatatcttcctacagaaactagacagaacgattctcagaaactcctttgtgatgtgtgcgttcaactcacagagtttaacctttcttttcatagagcagttaggaaacactctgtttgtaaagtctgcaagtggatattcagacctctttgaggtcttctttggaaacgggatttcttcctattctgctagacagaagaattcccagtaacttccttgtgttgtgtgtgttcaactcacagagttgaactttcatttacacagagcagatttgaaacactctttttgtggaatttgcaagtggagatttcaagcgctttgaggccaaggcacaaaaggatatatcttcgtataaaaactagacagaatcattctcagaaactgctctgcgatgtgtgcgttcaactctcagcagtttaacttttcttttcattcagcagtgtggaaacactctgtttgtaaagtctgcacgtggatattttgaccacttagaggccttcgttggaaacgggtttttttcctgtaaggctagacagaagaattcccagtaacttcccttgtgttgtgtacattcaactcacagagttgaacgttcccttagacagagctgatttgaaacactctttttgtgcaattggcaagtggagatttctagcgctttaaggtcaatggcagaaaaggaaatatcttcgtttcaaaactagacagaatcattcccacaaactgcgttgtgatgtgttcgttcaactcacaagagtttaacctttcttttcatagagcagttaggaaacagtctgtttgtcaattctgtaagtggatattctgacatcttgtggccttcgttggaaacgggatttcttcatattctgctagacagaagaattctcagaaacttccttgtgttgtgtgtattcaactcacagagtagaacgatcctttacacagagcagacttgaaacactctttttgtggaatttgcaagtggagatttcagccgatttgaagtcaatggtagaaagggaaatatcttcgtatagaaactagacagaatgattctcagaaaatcttttgtgtgtgtgcgttcaactcacagagtttaacttttcttctcatagagcagttaggaaacactctgtttgtaaagtgtgcaagtggatattcagacctctttgaggccttcgttggaaacgggatttcttcatattatgctagacagaagaattcccagtaacttccttgtgttgtgtgtgttcaactcacagagttgaacttccatttacacagagcagatttgaaacactctttttgtggaatttgcaagtggagatttcaagcgctttgaggccaaaggcagaaaaggaaatatcttcctttcaaaactagacagaatcattctcagaaactgctctgcgatgtgtgcgttcaactctcagagtttaacttttcttttcattcagcagtttggaaacactctgtttgtaaagtcagcacgtggataatttgaccacttagaggccttcgttggaaacgggtttttttcatgtaaggctagacagaagaattcccagtaacttccttgtgttgtgtgcattcaactcacagagttgaacgtttccttagacagagcagaattgaaacactctatttgtgcaatttgcaagtgtagatttcaagcgctttatggtcagtggcagaaaaggaaatatcttcgtttcaaaactagacagaatgattctcagaaactcctttgtgatgtgtgcgttcaactcacagagtttaacctttcttttcatagagcagttaggaaacactctgtttgtaaagactgcaagtggatattcagacctctttgaggccttcgttggaaacgggatttcttcatattctgctagacagaagaattctcagtaacttccttgtgttgtgtgtattcaactcacagagttgaacgatcctttacacagagcagacttgaaacattctttttgtggaatttgcaagtggagatttcagccgctttgacgtcaatggtagaataggaaatatcttcctatagaaactggacagaatgattctcagaaactcctttgtgatgtgtgggttcaactcacagagtttaacctttcttttcatagagcagttaggaaacactctgtttgtaaggtctgcaagtggatattcagacctctttgaggccttcgttggaaacgggattttttcatataaggctagacagagaattctcagtaacttccttgtgttgtgtgtattcaactgacagagttgaactttcatttagagagagcagatttgaaacactgtttttgtggaatttgcaagtggagatttcaagcgctttggggccaaaggcagaaaaggaaatatcttcgtataaaaactagacagaatctttctcagaaactgctctgcgatgtgtgcgttcaactctcagagtttaacttttcttttcattcagcagtttggaaacactctgtttgtaaagtctgcacgtggatattttgaccacttagaggccttcgtttgaaacgggtttttttcctgtaaggctagacagaagaattcccagtaacttccttgtgttgtgtacattcaactcacagagttgaacgttcccttagacagagcagatttgaaacactctttttgtgcaattggcaaatggagatttcaagcgctttaaggtcaatggcagaaaaggaaatattcttcgtttcaaaactagacagaatcattcccacaaactgcgttgtgatgtgttcgttcaacccacagagtttaacctttctgttcatagagcagttaggaaacactctgtttgtaaagtatgaaagtggatattctgacatcttgtggccttcgttggaaacgggatttcttcatattctgctagacagaagaattctcagtaacttccttgtgttgtgtgtattcaactcacagagttgaacgatcctttacacagagcagacttgaaacactctttttgtggaatttgcttgtggagatttcagccgctttgaggtcaatggtagaaaaggaaatatcttcgtataaagagtagacagaatgattctcataaactccttcgtgatgtgtgcgttcaactcacagagtttaacctttcttttcatagagcagttaggaaacactctgtttgtaaagtctgcaagtggatattcagacctctttgaggccttcgttttaaacgggatttcttcatattatgctagacagaagaattcccagtaacttccttgtgttgtgtgtgttcaactaatagagttgaactttcatttacacagagcagattggaaacactctttttgtggaatttgcaagtggagatttcaagcgctttgaggccaaaggcagaaaaggaaatatcttcttataaaaactagacagaatcattctcagaaactgctgcgtgatgtgtgcgttcaactctcagagtttaacttttcttttcattcagcggtttggaaacactctgtttttaaagtctgcacgtggaaattttgaccacttagaggccttcgttggaaacgggattttttcatgtaaggctagacagaagaattcccagtaactaccttgtgttgtgtacattcaactcacagagttgaacgttcccttagacagagcagatttgaagtactctttttgtgcaattggcaaatggagatttcaagcgctttaaggtcaatggcagaaaaggaaatatcttcgtttcaaaactagacagaatcattcccacaagctgcgttgtgatgtgttcgttcaactcacagagtttaacctttctgttcatagagcagttaggaaaccctctgtttgtaaagtctgcaagtggatattcagacctctttgaggctttcgttggaaacgggatttcctcaaattctgctagacagaagaattctcagtaacttccttgtgttgtgtgtattcaactcacagagttgaatgatcctttacacagagcagacttgaaacactctttttgtggaatttgcaagtggagatttcagccgctttgaggtcaatggtagaaaaggaaactgtcttcatataaagaatagacagaatgattctcagaaaatcttttgtgatgtgtgcgttcaacccacagagtttaacctttcttttcatagagcagttaggaaacactctgtttgaaaagtctgcaagtggatattcagacctctttgaggccttcgttggaaacgggatttcttcatattatgctagacagaagaattcccagtaactttccttgtgttgtgtgtgttcaactcacagagttgaactttcatttacacagagcagatttgaaacactctttttgtggaatttgcaagtggagatttcaagcgctgtgaggccaaaggcagaaaaggaaatatcttcgtataaaaactagacagaatcattctcagaaactgctctgcgatgtgtgcgttgaactctcagaagtttaacttttcttttcattcagcagtttggaaacactctgtttgtaaagtctgcacgtggataatttgaccacttagaggccttcgttggaaacgggtttttttcatgtaaggctagacagaagaattcccagtaacttccttgtgttgtgtgcattcaactcacagagttgaacgttcccttagacagagcagatttgaaacactctatttgtgcaatttgcaagtgtagatttcaagcgcattaaggtcaatggcagaaaaggaaatatcttcgtttcaaaattagacagaatcactcccacaaactgcgttgtgatgtgttcgttcaactcacagagtttaacctttcttttcatagagcagttaggaaacagtctgtttgaaaattctgtaagtggatattctgacatcttgtggccttcgttggaaacgggatttcttcatattctgctaggcagaataattctcagtaacttccttgtgttgtgtgtattcaactcacagagttgaaggatcctttacagagagcaggcttgaaacactctttttgtcgaatttgcaagtggagatttcagccgctttgaggtcaatggtagaaaagtaaatatcttcgtataaagactagacagaatgattctcagaaactcctttgtgatgtgtgcgttcaactcacagagttcaacctttcttttcatagagcagttgggaaacactctgtttgtaaagtctgcaagtggatattcagacttctttgagggcttcgttggaagcgggatttcttcatattctgctagacagaagaattcccagtaacttccatgtgttgtgtgtgttcaactcacagagttgaactttcatttacacagagcagatttgaaacactctttttgtggaatttgcaaatggagatttcaagcgctttgaggccaaaggcagaaaaggaaatatccttcgtataaaaactagacagaatcattctcagaaactgctctgcgatgtgtgcgttcaactctcagagtttaacttttcttttcattcagcagtttggaaacactctgtttgtaaactctgcacgtggataatttgaccacttagaggtcttcgttggaaacgggtttttttcatgtaacgctagacagaagaattcccagtaacttccttgtgttgtgtgcattcaactcacacagttgaacgttcccttagacagagcagatttgaaacactctatttgtgcaatttgcaagtgtagatttcaagcgctttaaggtcaatggcagaaaaggaaatatcttcgtttcaaaactagacagaatcattcccacaaactgcgttgtgatgtgttcgttcaactcacagagtttaacctttctgttcatagagcagttaggaaacactctgtttgtaaagtctgtaagtggatattctgatatcttgtggccttcgttggaaacgggatttcttcctattctgctagacagaagaattctcagtaacttccttgtgttgtgtgtattcaactcacagagttgaacgatcctttacacagagaagagttgaaacactctttttgtggaattggcaaggggagatttctgccgctttgagtcaatggtagaaaaggaaatatcttcgtataaagactagacagaatgattctcaggaactcctttgtgatgtgtgcgttcaactcacagagtttaacttttcttttcatagagcagttaggaaacactctgtttgtaaagtcttcaagtggatattcagacctctttgaggccttcgttggaaacgggatttcttcatattctgctagacagaagaattccaagtaacttccttgtgttgtgtgtgttcaactcacagagatgaactttcatttacacagagcagatttgaaacactctttttgtggaatttgcaagtggagatttcaagcgctttgaggccaaaggcagaaaaggaaatatcttcgtataaaaactagacagaaatcattctcagaacctgcttcgtgatgtgtgcgttcaactctcagagtttaacttttcttttcattcagcggtttggaaacactctgtttgtaaagtctgcacgtggaaattttgaccacttagaggccttcgttggaaacgggtttttttcatgtaaggctagacagaagaattcccagtaacttctttgtgttgtgtgcattcaactcacagagttgaacgttctcttagacagagcagatttgaaacactctatttgtgcaatttgcaagcgtagatttcaagcgctttaaggtcaatggcagaaaaggaaatatcttcgtttcaaaactagacagaaatgattcccacaaactgcgttgtgatgtgttcgttcaactcacagagtttaacctttctgttcatagagcagttaggaaacactctgtttgtaaagtctgtaagtggatattctgacatcttgtggccttcgttggaaacgggatttcttcatattatgctagacagaagaattctcagtaacttccttgtgttgtgtgtattcaactcacagagttgaacgatcctttacacagagcagtcttgaaacactctttttgtggaatttgcaagtggagatttcggccgctttgaggtcaacggtagaaaaggaaatatcttcgtataaagactagatagaatgattctcagaaactcctttgtgatgtgtgcgttcaactcacagagtttaacctttcttttcatagcgcagttgggaaacactctgtttgtaaagtctgcaagtggatattctgacatccttgaggctttcgttggaaacgggatttcttcatattctgctagaaagaagaattctcagtaacttccttgtgttgtgtgtattcaactgacagagttgaactttcatttagagtgagcagatttgaaacactgtttttgtggaatttgcaagtggagatttcaagcgctttggggccaaaggcagaaaaggaaatatcttcgtatataaactagacagaatcattctcagaaactgctctgcgatgtgtgcgttcaactctcagagtttaacttttcttttcattcagcagtttggaaacactctgtttgtaaagtctgcacgtggataacttgacctcttagaggccttcgttggaaacgggtttttttcctgtaaggctagacagaagaattcccagtaacttccttgtgttgtgtgcactcaactcacagagttgaacgttcccttagacagagcagatttgaaacactctatttgtgcaatttgcaagcgtagatttcaagcgctttaaggtcaatggcagaaaaggaaatatcttcgtttcaaaactagacagaatcattcccacaaactgcgttgtgatgtgttcgttcaactcacagagtttaacctttcttttcatagagcagttaggaaacattctgtttgtaaattctgtaagtggatattctgacatcttgtggccttcgttggaaacgggatttcttcatattctgctagacagaagaattctcagtaacttccttgtgttgtgtgttttcaactcagagagttgaacgatcctttacacagagcagacttgaaacactctttttgtggaatttgcaactggagatttcagccgcgttgatgtcaatggtagaaaaggaaatatcttcgtataaaaactggacagaatgattctcagaaactcctttgtgatgtgtgcgttcaactcacacagtttaacctttcttttcatagagaagttaggaaacactctgtttgtaaagtctgcaagtggatgttcagacctctttgaggccttcgttggaaacgggtttttttcatataaggctagacagaagaattcccagtaacttccttgtgttgtgtgtgttcaactcacagagttgaactttcatttacccagagcagatttgaaacactctttttgtggaatttgcaaatggagatttcagccgcgttgaggtcaatggtagaaaaggaaatatcttcgtttcaaaactagacagaatcattctcaggaactactgcgtgatgtgtgggttcaactctcagagtttaacttttcttttcattcagcggtttggaaacactctctttgtaaagtctgcacgtggaaattttgaccacttagaggccttcgtttgtttttttcatgtaaggctagacagaagaattcccagtaacttccttgtgttgtgtgtattcaactcacagagttgaacgatcctttacacagagcggacttgtaacactctttttgtggaatttgcaagtggagatttcagccgctttgaagtcaaagttagaaaaggaaataacttcctataaaaactagacagattcattcccacaaactgcgttgtgatgtgttcgttcaactcacagagtttaacctttcttttcatagagcagttaggaaacagtccgtttgaaaattctgtaagtggatattctgacatcttgtggccttcgttggaaacgagatttcttcatattctgctagacagaagaattctcagtaacttccttgtgttgtgtgtattgaactcacagagttgaacgatcctttacacagagcagacttgaaacactctatttgtagaatttgcaagtggagatttcagccgctttgaggtcagtagtagaaaaggaaatatcttcgtggaaaaactagacagaatgattctcagaaactcctttgtgatgtgtgcgttcaacacacagagtttaacttttcttttcatagagcagttagtaaacactctgtttataaagtctgcaagtggatattcagacccctttgaggccttcgttggaaacgggatttcttcatattatgctagacagaagaattctcagaatcttccttgtgttgtgtgtattcaactcacagagttgaacgatcctttacacagagcagacttgaaacactctttttgtggaatttgcaagtggagatttcaagcgctttgaggccaaaggcagaaaaggaaatatcttcgtagaaaaactagacagaatcattctcagaaactgctctgcgatgtgtgcgttcaactctcagagtttaacttttcttttcattcagcagtttggaaacactctgtttgtaaagtctgcacgtggataatttgaccacttagaggtcttcgttggaaacgggttttttcatgtaaggctagacagaagaattcccagtaacttcccttgtgttgtgtacattcaactcacagagttgaacgttcccttagacagagcatatttgaaacactctttttgtgcaattggcaagtggagatttcaagcgctttaaggtcaatgggagaaaaggaaatatcttcgtttcaaaactagacagaatcttcccacaaactgcgttgtgatgtgttcgttcaactcacagagtttaacctttcttttcatagagcagttaggaaacagtctgtttgtcaattctgtaagtggatattctgacatcttgtggccttcgttggaaacgggatttcttcatattctcctagacagaagaattctcagtaacttccttgtgttgtgtgtattcaactcacagagttgaacgatcctttacacagagcagacttgaaacactctttttgtggaatttgcaagtggagatttcagccgctttgaggtcaatggtagaaaaggagacatcttcgtataaaaactagacagaatgattcttagaaactcctttgtgatgtgtgcgttcaactcacagagtttaccctttcttttcatagagcagttaggaaacactctgtttgtaaagtctgcaagtggatattcagacatccttgaggctttcgttggaaacgggatttcttcatattctgccagaaagaagaattcccagtaacttccttgtgttgtgtgtgttcaactcacagagttgaactttcatttacacagagcagatttgaaacactctttttgtggaatttgcaagtggagatttcaagcgctttgaggtcaatggtagaaaaggaaatatcttcgtataaaaactagacagaatcattctcagaaactgctctgcgatgtgttcgttcaactctaagagtttaacttttcttttcattcagcagtttggaaacactctgtttgtaaagtctgtacgtggataatttgaccacttagaggccttcgttggaaacgggtttttttcatgtaaggatagacagaagatttctcagtaacttccttgtgttgtgtgtattcaactcacagagttgaacgatcctttacacagagcagacttgtatcactctttttgtggaatttgcaagtggagatttcagccgctttgaagtcaaaggtagaaaaggaaatatcttcctataaaaactagacagaatgattctcagaaacttctttgtgatgtgtgcgttcaactcacagagtttaacctttcttttcatagagcagttaggaaacactgtgtttttaaactctgcaagtggatattcagacctctttgaggccttcgttggaaacgggatttcttcttactgtgctagacagaagaattctcagtaacttccttgtgttgtgtgtattcaactcacagagttgaccgatcctttacacagagcagacttgtaacactctttttgtggaatttgcaagtggagatttcagccgctttgaagtcaaaggtagaaaagggaatatcttcctataaaaactagacagaatgattctcagaaactcctttgtgatgtgtgcgttcaactcacagagtttaacctttcttttcatagagcagttaggaaacactctgtttgtaaagtctgcaagtggatattcagacctctctgaggccttcgttggaaacgggatttcttcatactgtgctagacagaagaattcccagtaacttccttgtgttgtgtgtgttcaactcacagagttgaactttcatttacccagagcagatttgaaacactctttttgtggaatttgcaagtggagatttcaagcgttttgaggccaaaggcagaaaaggaaatgtcttcgtttcaaaactagacagaatcattctcagaaactgctctgcgatgtgtgcgttcaactctcagagtttaacttttcttttcattcagcagtttggaaacactctgtttgtaaagtctgcacgtggatattttgaccatttagaggccttcgttggaaacgggtttttttcttgtaaggctagacagaagaattctcagtaactcccttgtgttgtgtgtattcaactcacagagttgaacgatcctttacagagagcagacttgaaacactctttttgtggaatttgcaagtggagatttcagccgctttgaggtcaatggtagaataggaaatatcttcctatagaaactagacagaatgattctcagaaattcctttgtgatgtgtgcgttcaactcacagagtttaacctttcttttcactagagcagttaggaaacactctgtttgtaaagtctgcaagtggatattcagacctctttgaggccttcgttggaaacgggatttcttcatattctgctagacagaagaattctcagtaacttccttgtgttgtgtgtattcaactcacagagttgaacgatcctttacacagagcagacttgaaacactctttttgtggaatttgcaagtggagatttcagccgctttgaggtcaatagtagaaaaggaaatatcttcgtagaaaaactaggcagaatgattctcagaaactcctttgtgatgtgtgcgttcaagtcacagagtttaacctttcttttcatcgagcagttaggaaacactctgtttgtaaagtctgcaagtggatattcagacatccttgaggctttcgttggaaacgggatttcttcatattctgctagaaagaagaattcccagtaacttccttgtgttgtgtgtgttcaactgacagagttgaactttcatttacccagagcagatttgaaacactctttttgtggaatttgcaagtggagatttcaagcgctttgaggccaaaggcagaaaaggaaatatcttcgtttcaaaactagacagaatcattctcagaaactgctgcgtgatgtgtgcgtccaacactcagagtttaacttttcttttcattcagcggtttggaaacactctgtttgtaaagtctgcacgtggatattttgaccacttagaggccttcgttggaaacgggtttttttcatgtaaggctagacagaaggaattcccagtaacttccttgtgttgtgtacattcaactcacagatttgaacgttcccttagacagagcagatttgaaacactctttttgtgcaattggcaaatggagatttcaagcgctttaaggtcaatggcagaaaaggaaatatcttcgtttcaaaactagacagaatcattcccacaaactgcgttgtgatgtgttcgttcaactcacagagtttaacctttctgttaatagagcagttaggaaacactctgtttgtaaagtttgcaagtggatattcagacctccttgaggccttcgttggaaacgggatttcttcatattctgctagacagaagaattctcagaatcttccttgtgttgtgtgtattcaactcacagagttgaacgatcctttacacagagcagacttgaaacactctttttgtggaatttgcaagtggagatttcagccgctttgaggtccatggtagaaaaggaaatgtcttcgtataaaaactagacagaatgattctcagaaacttctttgtgatgtgtgcgttcaactcacagagtttaacctttcttttcatagagcagttaggaaacactctgtttgtaaattctgcaagtggatattcagacctctttgaggccttcgttggaaacgggatttcttcatactatgctagacagaagaattcccagtaacttccttgtgttgtgtgtgttcaactcacagatttgaactttcatttacacagagcagatttgaaacactctttttgtggaatttgcaagtggagatttcaagcgctttgaggccaaaggcagaaaaggaaatatcttcgtataaaaactagacagaatcattctcagaaactgctgcgtgatgtgtgcgttcaactctcagcgtttaacttttcttttcattcagcggtttggaaacactctgtttgtaaagtctgcacgtggatattttgaccacttagaggccttcgttggaaacgggtttttttcatgtaaggctagacagaagaattcccagtaacttccttgtgttgtgtgcattcaactcacagagttgaacgttcccttagacagagcagatttgaaacactctatttgtgcaatttgcaagtgtagttttcaagctctttaaggtcaacggcagaaaaggaaatatcttggtttcaaaactagacagaatgattctcagagaatcttttgtgatgtgtgcgttcaactcacagagtttaacttttcttctcatagagcagttaggaaacactctgtttgtaaagtctgcaagtggatattcagacctctttgaggtcttcgttggaaacgggatttcttcatattatgctagacagaataattctcagtaacttccttgtgttgtgtgtattcaactcacagagttgaaggatcctttacagagagcaggcttgaaacactctttttgtcgaatttgcaagtggagatttcagccgctttgaggtcaaaggtagaataggaaatatcttcttatagaaactagacacaatgattctcagaaacttctttgtgatgtgtgcgttcaactcacagagtttaacctttcttttcatagagcagttaggaaacactctgttggtaaactctgcaagtggatattcagacctctttgaggccttcgttggaaacgggatttcttcatactatgctagacagaagaattcccagtaacttccttgtgttgtgtgtgttcaactcacagagttgaactttcatttacacagggcagatttgaaacactctttttgtggaatttgcaaatggaggtttcaagcgctttgaggccaaaggcagaaaaggaaatatcttcgtataaaaactagacagaatcattctcagaaactgctctgcgatgtgtgcgttcaactctcagagtttaacttttcttttcattcagcagtttggaaacactctgtttgtaaagtctgcacgtggataatttgaccacttagaggccttctttggaaacgggtttttttcatataaggctagacagaagaattcccagtaacttccttttgttgtgtgtgttcaagtcacacagatgaactctcatttacacagagcagatttgaaactctctttttgtggaatttgcaaatggagatttcaagcgctttgaggccaaaggcagaaaaggaaatatcttcctataaaaactagacagaatcattctcagaaactgctctgcgatgtgtgcgttcaactctcagagtttaacttttcttttcattcagcagtttggaaacactctgtttgtaaagtctgcacgtggataacttgaccacttagaggccttcgttggaaacgggtttttttaacgtaaggctagacagaagaatttcccagtaacttccttgtgttgtgtgcattcaactcacagagttgaacgttcccttagacagagcagatttgaaacactctatttgtgcaatttgcaagtgtagatttcaagcgctttaaggtcaatggcagaaaaggaaatatcttcgtttcaaaactagacagaatcattcccacaagctgcgttgtgatgtgttcgttcaactcacagagtttaacctttctgttcatagagcagttaggaaacacgctgtttgtaaagtctgtaagtggatattctgacatcttgtggccttcgttgcaaacgggatttcttcatattctgctagacagaagaattctcagtaactaccttgtgttctgtgtattcaactcacagagttgaacgatcctttacacagagcagacttgaaacactctttttgtggaatttgcaagtggagatttcagccattttgaggtcaatggtagaaaaggaaatatcttcgtagaaaaactagacagaatgattctcagaaactgctttgtgatgtgtgcgttcaactcacagagttcaacctttcttttcatagagcagttaggaaacactctgtttgtaaagtctgcaagtggatattcagacctctttgaggccttcgttggaaacgggatttcttcatattatgctagacagaagaattcccagtaacttccttgtgttgtgtatgttgaactcacagagttgaactttcatttacacagagcagatttgaaacactctttttgtggaatttgcaaatggagatttcaagcactttgaggccaaaggcagaaaaggaaatatcttcatataaaaactagacagaatcattctcagaaactgctctgcgatgtgtgcgttcaactctcagagtttaacttttcttttcattcagcagtttggaaacactctgtttgtaaagtctgcacgtggataatttgatcacgtagaggccttcgatggaaacggttttttttcatgtaaggctagacagaagaattcccagtaacttccttgtgttgtgtacattcaactcacagagttgaacgttcccttagacagagcagatttgaaacactctttttgtgcaattggcaagtggagatttcaagcgctttaaggtcaatggcaaaaaaggaaatatcttcgtttcaaaactagacagaatcattcccacaaactgcgttgtgatgtgttcgttcaactcacagagtttaacctttcttttcatagagcagttaggaaacactctgtttgtgaactctgcaagtggatattctgacatcttgtggcctttgttggaaacgggatttcttcatattctgctagacagaagaattctcagtaacttccttgtgttgtgtgtattcaactcacagagttgaacgatcctttacacagagcagacttgaaacactctttttgtggaatttgcaagtggagatttcagccactttgagttcaatggtagaataggaaatatcttcctatagaaactagacagaatgattctcagaaactcctttgtgatgtgtgcgttcaactcacagagttcaacctttcttttcatagagcagttgggaaacactctgtttgtaaagtctgcaagtggatattcagacttctttgaggccttcgttggaagcaggatttcttcatattctgctagacagaagaattcccagtaacttccttgtgttgtgtgtcttcaactcacagagttgaactttcatttacacagagcagatttgaaacactctttttgtggaatttgcaaatggagatttcaagcgctttgaggccaaaggcagaaaaggaaatatcttcggtataaaaacttgacagaatcattctcagaaactgctctgcgatgtgtgcgttcaactctcagagtttaacttttcttttcattcagcagtttgaaaacactctgtttgtaaagtctgcacgtggataatttgactacttagaggccttcgttggacacgggtttttttcatgtaaggctagacagaagaattcccagtaacttccttgtgttctgtgcattcaactcacagagttgaacgttccctcagacagagcagatttgaaacactctatttgtgcaatttgcaagtgtagatttcaagcgctttaaggtcaacggcagaaaaggaaatatcttcgtttcaaaactagacagaatgattctcagaaactcctttgtgatgtgtgcgttcaactcacagagtttaacctttcttttcatagagcagttaggaaacactctgtttgtaaagtctgcaagtggatattcagacatctttgaggccttcattggaaacgggatttcttcatgttctggtagacacaagaattctcagaaacttccttgtgttgtgtgttttcaactcacagagttgaacgatgctttacacagagtagacttgaaacactctttttgtgtaatttgcaagtggagatttcagccgctttgaagtcaatggtagaaaaggaaatatcttcgtataaaaactagacagaatgattctcagaaactcctttgtgatgtgtgcgttcaactcacagagtttaacctttcttttcatagagcagttaggaaacactctgtttgtaaagtctgcaagtggatattcagacctctttgaggccttcgttggaaaggggatttcttcatattctgctagagagaagaattcccagtaacttccttgtgttgtgtgtgttcaactcacagagttgaactttgatttacacagagcagatttgaaacactctttttgtggaatttgcaagtggggatttcaagcgctttgaggccaaaggcagaaaaggaaatatcttcgtataaaaactagacagaatcattctcagaaactgctctgtgatgtgtgcgttcaactctcagagttgaacttttcttttcattcagcagtttggaaacactctgtttgtaaagtctgcacgtggatattttgaccacttagaggcgttagttggaaacgcgtttttttcatgtaaggctagacagaagaattcccagtaacttccttttgttgtgtgcattcaactcacagagttgaacgttcccttagacagagcagatttgaaacactgtttttgtgcaatttgcaagtggagatttcaagcgctttaaggtcaatggcagaaaaggaaatatcttcgtttcaaaactagacagaatcattcccacaaactgcgttgtgatgtgttcgttcaactcacagagtttaacctttcttttcatagagcagttaggaaacagtctgtttgtgaattctgtaagtggatattctgacatcttgtggccttcgttggaaatgggatttcttcatattctgctagacagaagaattctcagtaacttccttgtgttgtgtgtattcaactcacagagttgaacgatcatttacacagagcagacttgtaacactctttttgtggaatttgcaagtggagatttcagccgctttgaagtcaaaggtagaaaaggaaatatcttcctataaaaactagacagaatgattctcagaaactcctttgtgatgtgtgcgttcaactcacagagttcaacctttcttttcatagagcagtttggaaacactctgtttgtaaagtctgcaagtggatattcagacttctttgaggccttcgttggaagcgggatttcttcatattctgctagacagaagaattctcagtaactgccttgtgttgtgtgtattcaactcacagagttgaacgatcctttacacagagcagacttgaaacactctttttgtggaatttgcaagtggagatttcagccgctttgaggtcaatggtagaataggaaatttcttcctatagaaactagacagaatcattctcagaaactgctctgcgatgtgtgcgttcaactctcagagtttaacttttcttttcattcagcagtttggaaacactctgtttgtaaagtctgcacgtggataacttgaccacttagaggccttcgttggaaacgggtttttttcatgtaaggctagacagaagaattcccagtaacttccttgtgttgtgtgcattcaactcacagagttgaacgttcccttagacagagcagatttgaaacactctatttgtgcaatttgtaagtgtagatttcaagcgctttaaggtcaatggcagaaaaggaaatatcttcgtttcaaaactagacagaatcattcccacaaactgcgttgtgatgtgttcgttcaactcacagagtttaacctttctgttcatagagcagttaggaaacactctgtttgtaaagtctgtaagtggatattctgacatcttgtggcccttcgttggaaactggatttctccatattctactagacagaataattctcagtaacttccttgtgttgtgtgtattcaactctcagagttgaacgatccttctacagagagcagacttgaaacactctttttgtggaatttgcaagtggagatttcagccgctttgaggtcaatagtagaaaaggaaatatcttcgtagaaaaactagacagaatgattctcagaatctcctttgtgatgtgtgcgttcaactcacagagtttaacctttcttttcatagagcagttaggaaacactctgtttgtaaagtctgcaagtggatattcagacctctttgaggccttcgttggaaacgggttttttcatataaggctagacagaagaattcccagtaacttccttgtgttgtgtgtgttcaactcacagagttgaactttcatttacacagagcagatttgaaacactctttttgtggaatttgcaattggagatgtcaagcgctttgaggccaaaggcagaaaaggaaatatcttcgtttcaaaactagacagaatcattctcagaaactgctgcatgatgtgtgcgttcaactctcagagtttaacttttcttttcattcagcggtttggaaacactctgtttgtaaagtctgcacgtggatattttgaccacttagaggccttcgttggaaacgggtttttttcatgtaaggctagacagaagaattcccagtaacttccttgtgttgtgtgcattcaactcacagagttgaacgttcctttagacagagcagatttgaaacactctatttgtgcaatttgcaagtgtagatttcaagcgctttaaggtcaacggcagaaaaggaaatatcttcgtttcaaaactagacagaatgattctcagaaactcctttgtgatgtgtgcgttcaactcagagagttcaacctttcttttcatagagcagttgggaaacactctgtttgtaaagtctgcaagtggatattcagacttctttgaggccttcgttggaagcgggatttcttcatgttctgctagacagaagaattctcagaaacttccttgtgttgtgtgttttcaactcacagagttgaacgatcctttacacagagcagacttgaaacactccttttgtggaatttgcaagtggagatttcagccggtttgaggtcaatggtagaataggaaatatcttcctatagaaagtagacagaatgattctcagaaactcctttgtgatgtgtgcgttcaactcacagagtttaacctttcttttcatagagcagttaggaaacactctgtttgtaaagtctgcaagtggatattcagacctccttgaggccttcgttggaaacgggatttcttcatattttgctagacagaagaattctcagtaacttccttgtgttgtgtgtattcaactcacagagttgaacgatcctttacacagagaagacttgaaacactctttttgtggaatttgcaagtggagatttcagccgctgtgagttcaatggtagaataggaaatatcttcctatagaaactagacagaatcattctcagaaactgctctgcgatgtgtgcgttcaactctcagggtttaacttttcttttcattcagcagtttggaaacactctgtttgtaaagtctgcacgtggataatttgaccacttagaggtcttcgttggaaacgggtttttttcatgtaaggctagacagaagaattcccagtaacttccttgtgttgtgtgcattcaactcacagagttgaacgttcccttagacatagcagatttgaaacactctctttgtgcaatttgcaagtgtagatttcaagcgctttaaggtcaacggcagaaaaggaaatatcttcgtttcaaaactagacagaatgattctcagaaactcctttgtgatgtgtgcgttcaactcacagagtttaacctttcttttcatagagcagttaggaaacactctgtatgtaaagtctgcaagtggatattcagacctccttgaggccttcgttggaaatgggatttcttcatattctgctagacagaagaattctcactaacttccttgtgttgtgtgtattcaactcacagagttgaacgatcctttacacagagcagacttgaaacactctttttgtggaatttgcaagtggagatttcagccgctttgaggtcaatggtagaaaaggaaatatcttcgtataaagactagacagaatgattctcagaaactcctttgtgatgtgtgcgttcaactcacagagtttaacctttctttccatagagcagttaggaaacactctgtttgtaaagtctgcaggtggatattcagacctccttgaggccttcgttggaaacgggatttcttcatattatgctagacagaagaattctcagtaacttccttgtgttgtgtgtattcaactcacagagttgaactttcatttggagagagcagatttgaaacactgtttttgtggaatttgcaagtggagatttcaagcgctttggggccaaaggcagaaaaggaaatatcttcgtataaaaactagacagaatgattctcagaaactcctttgtgatgtgtgcgttcaactcacagagtttaacctttcatttcatagagcagttaggaaacactctgtttgtaaagtctgcaagtggatattcagacatccttgaggctttcgttggaaacgggatttcttcatattctgctagaaagaagaattctcagtaacttccttgtgttgtgtgtattcaactcacagatttgaacgatcgtttacacagagcagacttgagacactctttttgtggaatttgtaagtggagatttcagccgctttgaggtcaatggtagaaaaggaaatatcttcatataaaaactagacagaatgattctcagaaactcctttgtgatgtgtgcgttcaactcacagagtttaacctttcttttcatagagcagttaggaaacactctgtttgtaaagtctgcaagtgaatattcagacctctttgaggccttcgttggaaacgggatttcttcatattaagctagacagaagaattctcaataacttccttgtgttgtgtgtattcaactcacagagttgaacgatcctttacacagagcagacttgaaacactctttttgtggaatttgcaagtggagatttcagccgctttgaggtcaatggtagaataggaaatatcttcctatagaaagtagacagaatgattctcagaaactcctttgtgatgtgtgcgttcagctcacagagtttaacctttcttttcatagagcagttaggaaacactgtgtttgtaaagtctgcaagtggatattcagacctccttgaggccttcgttggaaacgggatttcttcatattatgctagacagaagaattctcagtaacttccttctattctgtgtattcaactcacagagttgaacgatcctttacacagagcagacttgaaacgctcttttggtggaattggcaagtggagaattcagccgctttgagatcaatggtagaataggaaatatattcctatggaaactagagagaatgattctcagaaactcctttgtgatgtgtgcgttcaactcacagagtttaacctttcttttcatagagcagttaggaaacactctgtttgtaaagtctgcaagtggatactcagacctctttgaggccttcgttggaaacgggatttcttcatattatgctagacagaagaattcccagtaacttccttgcgttgtgtacattcaactcacagagttgaacgttcccttagacagagcagatttgaaacactctttttgtgcaattggcaagtggagatttcaagcgctttaaggtcaatggcagaaaaggaaatatcttcgtttcaaaactagacagaatcattcccacaaactgcgttgtgatgtgttcgttcaactcacagagtttaacctttctgttcatagagcagttaggaaacactctgtttgtaaagtctgcaagtggatattcagacctctttgaggccttcgttggaaacgggatttcttcatattatgctacacagaggaattctcaggaacttccttgtgttgtgtgtattcaactcacagagttgaacgatcctttacacagagcagacttgaaacactctttttgtggaatttgcaagtggagatttcagccgctttgagttcaaaggtagaataggaaatatcttcctatagaaagtacacagaatgattctcagaaacttctttgtgatgtgtgcgttcaactcacagagtttaacctttcttttcatagagcagttaggaaacactctgtttgtaaactctgcaagtcgatattcagacctctttgaggccttagttggaaacgggatttcttcatactatgctagacagaagaattctcagtaacttccttgtgttgtgtgtattcaactgacagagttgaactttcatttagagagagcagatttgtaacactgtttttgtggaatttgcaagtggagatttcaagagctttggggccaaaggcagaaaaggaaatatcttcgtataaaaactagacagaatcattctcagaaactgctctgcgatgtgtgcgttcaactctcagagtttaactttgcttttcattcagcagtttggaaacactctgtttgtaaagtctgcacgtggataatttgaccacttagaggccttcgttggaaacgggtttttttcatgtaaggctagacagaagaattcccagtaacttccttgtgttgtgtgcattcaactcacagagttgaacgttcccttagacagagcagatttgaaacactctatttgtgcaatttgcaagtgtagatttgaagcgctttaaggtcaatggcagaaaaggaaatatcttagtttcaaaactagacagaatcattcccacaaactgctttgtgatgtgttcgttcaactcacagagtttaagctttctgttcatagagcagttaggaaacactctgtttgtaaagtctgcaagtggatattcagacctccttgaggccttcgttggaaacgggatttcttcatattctgctagacagaagaattctcagtaacttccttgtgttgtgtgtattcaactcacagagttgaacgatcctttacatagagcagacttgtaacactctttttgtggaatttgcaagtggagatttcagccgctttgaagtcaaaggtagaaaaggaaatatcttcctataaaaactagacagaatgattctcagaaactcctttgtgatgtgtgcgttcaactcacacagtttaacctttcttttcatagagcagttaggaaacactctgtttgtaaagtctgcaagtggatattcagacctcccttgaggtcttcgttggaaacgggatttcttcatattatgctagacagaagaattcccagtaacttccttgtgttgtgtgtgttcaactcacagagttgaactttcatttacacagagcagatttgaaacactctttttgtataatttgcaaatggagatttcaagcgctttgaggccaaaggcagaaaaggaaatatcttcttataaaaactagacagaatcattctcagaaactgctctgcgatgtgtgcgttcaactctcagagtttaacttttcttttcattcagcagtttggaaacactctggttgtaaagtctgcacgtggatattttgaccacttagaggccttcgttggaaacgggtttttttcctgtaaggctagacagaagaattcccagtaacttccttgtgttgtgtacattcaactcacagagttgaacgttcccttagacagagcagatttgaaacactctttttgtgcaactggcaaatggagatttcaagcgctttaaggtcaatggcagaaaaggaaatatcttcgtttcaaaactagacagaatgattctcataaactcctttgtgatgtgtgcgttcaacacacagagtttaacctttctgttcatagagcagttaggaaacactctgtttgtaaagtctgtaagtggatattctgacatcttgtggccttcgttggaaacgggttttcttcatattctgctagacagaagaattctcagtaacttccttgtgttgtgtgtattcaactcacagagttgaacgatcctttacacagaggagacttgtaacactctttttgtggaatttgcaagtggagatttcagccgctttgaagtcaaaggtagaaaaggaaatatcttcctataaaaactagacagaatgattctgagaaactcctttgtgatgtgtgcgttcaactcacagagtttaacctttcttttcatagagcagttaggaaacactctgtttgtaatgtgtgcaagtggatattcagacctccttgaggccttcgttggaaacgggatttcttcatattatgctagacaaaagaattctcagtaacttccttgtgttgtgtgtattcaactcacagagttgaacgatcctttacacagagcagactggaaacactctttttgtggaatttgcaagtggagatttcagccgctttgaggtcaatggtagaataggaaatatcttcctatagaaactagacagaatcattctcagaaactgctgtgtgatgtgtgcgttcaactctcagagtttaacttttcttttcattcagcggtttggaaacactctgtttgtaaagtctgcacgtggaaattttgaccacttagaggccttcgtggaaacgggtttttttcatgtaaggctagacagaagaattaccagtaacttccttgtgttgtgtgcattcaactcacagagttgaacgttcccttagacagagcagatttgaaacactctatttgtgcaatttgcaagtgtagatttcaagcgctttaaggtcaatggcagaaaaggaaatatcttcgttttaaaactagacagaatcattcccacaaactgcgttgtgatgtgttcgttcaactcacagagtttaacctttcttttcatagagcagttaggaaacagtctgtttgtaaattctgtaagtggatattctgacatccttgtggccttcgttggaaacgggatttcttcatattctgctagacagaagaattctcagaatcttccttgtgttgtgtgtattcaactcacagagttgaacgatggtttacacagagcagatttgaaacactctttttgtggaatttgcaagtggagatttcagccgctttgaggtcaatggtagaaaaggaaatatcttcatataaaaactagacagaatgattctcagaaactcctttgtgatgtgtgcgttcaactcacagagtttaacctttcttttcatagagcagttaggaaacactctgtttgtaaagtctgcaagtggatattccgacctccttgaggccttctttggaaacgggatttcttcatattatgctagacagaagaattcccagtaacttccttgtgttgtgtgtgttcaactcacagagttgaactttcatttacacagagcagatttgaaacactctttttgtggcatttgcaagtggagatttcaagcgctttgaggccaaaggcagaaaaggaaatatcttcgtttcaaaactagacagaatcactctcagaaactgctctgcgatgtgtgcgttcaactctcagagtttaacttttcttttcattcagcagtttggaaacactctgtttgtaaagtctgcacgtggatattttgaccacttagaggccttcgttggaaacgggtttttttcctgtaaggctagacagaagaattgtcagaatcttccttgtgttgtgtgtattcaacacacagagttgaatgatggtttacacagagcagatttgaaacactcttttggtggaatttgcaagtggagatttcagccgctttgaggtcaatggtagaaaaggaattatcttcgtttcaaaactagacagaatcattctcacaaactgcgttgtgatgtgttcgttcaactcacagagtttaacctttctgttcatagagcagttaggaaacactctgtttgtaaagtctgtaagtggatattctgacatcttgtggccttcattggaaacgggatttcttcatattctgctagacagaagaattctcagtaacttccttgtgttgtgtgtattcaactcacagtagttgaacgatcctttacacagagcatacttgaaacactcttgttgtggaatttgcaagtggagatttcagccactttgaggtcaatggtagaaaaggaaatatcttcgtataaaaactagacagaatgattctcagaaactcttttgtgatgtgtgcgttcaactcacagagtttaacctttctgttcatagagccgttaggaaacactctgtttgtaaagtctgcaagtggatattcacacctccttgtgaccttcgttggaaacgggatttcttcatattctgctagacagaagaattctcagtaacttccttgtgttgtgtgtattcaactgacagagttgaactttcatttagagagagcagatttgaaacactgtttttgtggaatttgcaagtggagatttcaagcgctttggggccaaaggcagaaaaggaaatatcttcctatgaaaactagacagaatcattctcagaaactgctgtgtgatgtgtgcgttcaactctcacagtttaacttttcttttcattcagccgtttggaaacactctgtttgtaaagtctgcacgtggatattttgaccacttaaaggccttcgttggaaacgggtttttttcatgtaaggctagacagaagaattcccagtaacttccttgtgttctgtgcattcaactcacagagttgaacgttcccttagacagagcagatttgaaacactctatttgtgcaatttgcaagtgtagatttcaagcgctttaaggtcaataacagaaaaggaaatatcttcgtttcaaaactagacagaatcattctcacaaactgcgttgtgatgagttcgttcaactcacagagtttaacctttctgttcatagagcagttaggaaacactctgtttgtaatgtctgtaagtggatattctgacatcttgtggccttcgttggaaacgggatttcttcatattctgctagacagaagaattctcagtaacttccttgtgttgtgtgtattcaactcacagagttgaacgatcctttacacagagcagtcttgaaacactctttttgtggaatttgcaagtggagatttcagccgttttgaggtcaatggtagaaaaggaaatatcttcgtataaagactagacagaatgattctcagaaactcctttgtgatgtgggtgttcaactcacagagttaacctttcttttcatagagcagttaggaaacactctgtttgtaaagtctgcaagtggatattttcacctctttgaggccttcattggaaacgggttttttttcatgtaaggctagacagaagaattctcagtaccttccttgtgttgtgtgtattcaactgacagagttgaactttcatttagacagagcagatttgaaacactctttttctggaatttgcaagtggagatttcaagcgctttgaggccaaaggcagaaaaggaaatatcttcgtataaaaactagacagaatcattctcagaaattgctgcgtgatgtgtgcgttcaactctcagagtttaacttttcttttcattcagcggtttggaaacactctgtttgtaaagtctgcacgtggatattttgaccacttagaggccttcgttggaaacgggtttttttcatgtaaggctagacagaagaattcccagtaacttccttgtgttgtgtgcattcaactcacagagttgaacgttcccttagacagagcagatttgaaacactctatttgtgcaatttgcaagtgtagatttcaagcgcattaaggtcaatggcagaaaaggaaatatcttcgtttcaaaattagacagaatcattccacaaactgcgttgtgatgtgttcgttcaactcacagagtttaacctttctgttcatagagcagttaggaaacactctgtaaagtctgtaagtggatattctgacatcttgtggccttcgttgtaaacgggatttcttcatattctgctagacagaagaattctcagaatcttccttgtgttgtgtgtattcaactcacacagttgaacgattgtttacacagagcagatttgaaacactctttctgtggaatttgcacgtggagatttcagccgctttgaggtcaatggtagaaaaggaaatatacttcgtataaaaactagacagagtgattctcagaaactcctttgtgatgtctgcgttcaactcacagagtttaacctttcttttcatagagcagttaggaaacactctgtttgtaaagtctgcaagtggatattcagacatccttgaggctttcgttggaaacgggatttcttcatattctgctatacagaagaattctcagtaacttcccttgtgttgtgtgtattcaactgacagagttgaactatcatttagagagagcagatttgaaacactgttttgtggaatttgcaagtggagatttcaagcgctttggggccaaaggcagaaaaggaaatatcttcgtataaaaactagacagagtcattctcagaaactgctgcgtgatgtgtgtgttcaactctcagagtttaacttttcttttcattcagcggtttggaaacacgctgtttgtaaagtctgcacgtggatattttgaccacttagaggccttcgttggaaacgggtctttatcatgtaaggctagacagaagaattcccagtaacttccttgtgttgtgtacattcaactcacagagttgaacgttcccttagacagagcagatttgaaacactctttttgtgcaattgggaaatggagatttcaagcgctttaaggtcaatggcagaaaaggaaatatcttcgtttcaaaactagacagaatcattcccacaaactgcgttgtgatgtgttcgttcaactcacagagtttaacctttctgttcatagagcagttaggaaacactctgtttgtaaagtctgtaagtggatattctgacatcttgtggccttcgttggatacgggatttcttcatattctgctagacagaagaattctcagtaacttccttgtgttgtgtgtattcaactcacagagttgaacgatcctttacacagagcagacttgtaacactctttttgtggaatttgcaagtggagatttcagccgctttgaagtcaaaggcagaaaaggaaatgtcttcgtttcaaaactagacagaatgattctcagaaactcctttgtgatgagtgcgttcaactcacagagtttaacctttcttttcatagagcagttaggaaacactctgtttgtaaagtgtgcaagtggatattcagacctctttgaggccttcgttggaaacgggatttcttcatattctgctagacagaggaattctcaggaacttccttgtgttgtgtgttttcaactcacagagttgaacgatcctttacacagagcagacttgaaacactccttttgtggaatttgcaagtggagatttcagccgctttgaggtcaatggtagaataggaaatatcttcctatagaaactagacagaatcattctcagaaactgctgcgtgatgtgtgcgttcaactctcagagtttaacttttcttttcattcagcggtttggaaacactctgtttgtaaagtctgcacgtggaaattttgaccacttagaggccttcgttggaaacgggttttttttcatgtaaggctagacagaagaattcccagtaacttccttgtgttgtgtgcattcaactcacagagttgaacgttcccttagacagagcagatttgaaaaactctatttgtgcaatttgcaagtgtagatttcaagcgctttaaggtcaatggcagaaaaggaaatatcttcgtttcaaaactagacagaatgattctcagaaaatcttttgtgatgtgtgcgttcaactcacagagtttaacttttcttctcatagagcagttaggaaacactctgtttgtaaagtctgcaagtggatattcagacgtctttgaggccttcgttggaaacgggatttcttcatattctgctagacagaataattctcagtaacttccttgtgttgtgtgtattcaactcacagagttgaaggatcctttacagagagcaggcttgaaacactctgtttgtcgaatttgcaagtggagatttcagccgctttgaggtcaaaggtagaataggaaatatcttcttatagaaactagacagaatgattctcagaaactcctttgtgatgtgtgcgttcaactcacagagtttaacatttcttttcatagagcagttaggaaacactctgtttgtaaagtctgcaagtggatattcagacctctttgaggccttcgttggaaatggctttttttcatataaggctagacagaagaattcccagtaactttccttgtgttgtgtgtgttcaactcacagagttgaactttcatttacccagagcagatatgaaacactctttttgtggaatttgcaagtggagatttcaagcgctttgaggccaaaggcagaaaaggaaatatcttcgtataaaaactagacagaatcattctcagaaactgctctgcgatgtgtgcgttcaactctcagagtttaacttttcttttcattcagcagtttggaaacactctgtttgtaaagtctgcacgtggataattggaccacttagaggccttcgttggaaacgggtttttttcatgtaaggctatacagaagaattcccagtaacttccttgtcttgtgtacattcaactcacagagttgaacgttcccttagacagagcagatttgaaacactctttttgtgcaattggcaaatggagatttcaagcgctttaaggtcaatggcaggaaaggaaatatcttcgtttcaaaactagacagaatgattctcagaaaatcttttgtgatgtgtgcgttcaactcacagagtttaacttttcttctcatagagcagttaggaaacactctgtttgtaaagtctgcaagtggatattcagacctctttgaggccttcgttggaaacgtgatttcttcatattatgctagacagaataattctcagtaactttccttgtgttgtgtgtattcaactcaccgagttgaaggatcctttacagagagcaggcttgaaacactctttttgtcgaatttgcaagtggagattacagccgctttgaggtcaatggtagaaaaggaaatatcttcgtataaagactagacagaacgattctcagaaactcctttgggatgtgtgcgttcaactcacagagtttaacctttcttttcatagagcagttaggaaacactctgtttgtaaagtctgcaagtggatattcagacctctttgaggccttcgttggaaacgggatttcttcctattctgctagacagaagaattctcagtaactttccttgtgttgtgtgtattcaactcacagagttgaacgatcctttacacagagcagacttgaaacactctttttgtggaatttgcaagtggagatttcagccgctttgaggtcaatagtagaaaagtaaatatcttcgtagaaaaactagacagaatcattctcagaaactgctctgcgatgtgtgcgttcaactctcagagtttaacttttcttttcattcagcagtgtggaaacactctgtttgtaaagtctgcccgtggatattttgaccacttagaggccttcgttggaaacgggtttttttcctgtaaggctagacagaagaattcccaggaacttccttgtgttgtgtacattcaactcacagagttgaacgttcccttagacagagcagatttgaaacactctttttgtgcaattggcaagtggggatttcagccgctttgaggtcaatggtagaaaaggaaatatcttcgtataaaaactagacagaatcattcccaaaaactgcgttgtgatgtgtgcgttcaactcacagagtttaacctttcttttcatagagcagttaggaaacactctgtttgtaaactctgcaagtggatattcagacctctttgaggccttcgttggaaacgggatttcttcatactgtgctagacagaagaattctcagtaacttccttgtgttgtgtgtattcaactcacacagttgaatgatcctttacacagagcagacttgaaacactctttttgtggaatttgcaagtggagatttcagccgctttgagttcaatggtagaataggaaatatcttcttatagaaactagacagaatgattctcagaaacttctttgtgatgtgtgcgttcaactcacagagtttaacctttcttttcatagagcagttaggaaacactctgtttttaaactctgcatgtggatattcagacctctttgaggccttcgttggaaacgggatttcttcatactgtgctagacagaagaattcccagtaacttcctagtgttgtgtgtgttcaactcacagagttgaactttcatttacacagagcagatttgaaacactctttttgtggaattttcaagtggaaatttcaagcgctttgaggccaaaggcagaaaaggaaatatcttcgtataaaaactagacagaatcattctcagaaactgctctgtgatgtgtgcgttcaactctcagagtttaacttttcttttcattcagcactttggaaacactctgtttgtaaagtcttcacgaggatattttgaccacttagaggtctttgttggaaacgggtttttttcccataaggctagacagaagaattcccagtaacttccttgtgttgtgtgcattcaactcacagagttgaacgttcccttagacagagcagatttgaaacactctatttgtgcaatttgcaagtgtagatttcaagcgctttaaggtcaacggcagaaaaggaaatatcttcgtttcaaaaccagacagaatcattccctcaaactgcgttgtgatgtgttcgttcaactcacagagtttaacctttctgttcatagagcagttaggaaacactctgtttgtaaagtctgtaagtggatattctgacatctggtggccttcgttggaaacgggatttcttcatattctgctagacagaagaattctcagtaacttccttgtgttgtgtgtattcaactcacagagttgaacgatcctttacacagagcagacttgaaacactctttttgtggaatttgcaagtggagatttcagccgctttgatgtcaatggtagaaaaggaaataacttcgtataaagactagacagaattattctcagaaactcctttgtgatgtgtgtgttcaactcacagagtttaacctttcttttcatagagcagttagtaaacactctgtttataaagtctgcaagtggatattcagacccctttgaggccttcgttggaaacgggatttcttcatattctgctagacagaagaattcccagtaacttccttgtgttgtgtgtgttcaactcacagagttgaacttccatttacacagagcagatttgaaacactctttttgtggaatttgcaagtggagatttcaagcgctttgaggccaaaggcagaaaaggaaatatcttcgtttcaaaactagacagaatcattctcagaaactgctctgcgatgtgtgcgttcaactctcagagtttaacttttcttttcattcagcagtttggaaacactctgtttgtaaagtccgcacgtggatattttgaccatttagaggccttcgttggaaacgggtttttttcttgtaaggctagacagaagaattcccagtaacttccttgtgttgtgtgcattcaactcacagagttgaacgttcccttagacagagaagatttgaaacactctatttgtgcaatttgcaagtgtagatttcaagcgctttaaggtcaacggcagaaaaggaaatatcttcgtttcaaaaccagacagaatcattcccacaaactgcgttgtgaagtgttcgttcaactcacagagtttaacctttctgttcatagagcagttaggaaacactctgtttgtaaagtctgtaagtggatattctgacatcttgtggccttcgttggaaacgggatttcttcatattctgctagacagaataattctcagtaacttccttgtgttgtgtgtattcaactcacagagttgaacgatcctttacagagagcagagttgaaactctctttttgtggaatttgcaagtggagatttcagccgctttgaggtcaatggtagaaaaggaaatatcttcctatagaaactagacagagtgattctcagaaactcctttgtgatgtctgcgttcaactgacagagtttaacctttcttttcatagagcagttaggaaacactctgtttgtaaagtctgcaagtggatattcagacctccttgaggccttcgttggaaacgggatttcttcatattatgctagacagaagaattctcagtaacttccttgtgttgtgtgtattcaactcacagaattgaacgatcctttacacagagcagacttgaaacactctttttgtggaatttgcaagtggagatttcagccgctttgaggtcaatggtagaataggatatatcttcctacagaaactagacagaatcattctcagaaactgttgtgcgatgtgtgcgttcaactctcagagtttaacttttcttttcattcaggagtttggaaacactctgtaaactctgcatgtggatattttgaccacttagaggccttcgttggaaacgggtttttttcctgtaaggctagacagaagaattcccagtaacttccttgtgttgtgtacattcaactcacagagttgaacgttcccttagacagagcagatttgaaacactctttttgtgcaattggcaagtggagatttcaagcactttgaggtcaatggcagaaaaggaaatatcttcgtttcaaaactagacagaatcattcccacaaactgcgttgtgatgtgttcgttcatctcacagagtttaacctttcttttcatagagcagttaggaaacagtctgtttgaaaattctgtaaggggatattctgacatcttgtggccttcgttggaaacgggatttcttcatattctgctagacaaaagaattctcagtaacttccttgtgttgtgtgtattcaactcgcagagttgaacgatcctttacacagagcagacttgaaacactctttttgtggaatttgcaagtgaagatttcagccgctttaaggtcaatggtagaaaagggaatatcttcgtataaagactagacagaatgattctcagaaactcctttgtgatgtgtgtgttcaactcacagagtttaacctttcttttcatagagcagttagtaaacactctgtttataaagtctgcaagtggatattcatacccctttgaggccttcgttggaaacgggatttcttcatattatgctagacagaagaattctcagtaacttccttgtgttgtgtgtattcaactgacagagttgaactttcatttagatagagcagatttgaaacactgtttttgtggaatttgcaagtggagatttcaagcgctttggggccaaagcagaaaaggaaatatcttcgtataaaaactagacagaatcattctcagaaattgctctgcgatgtgtgcgttcaactctcagagtttaacttttcttttcattcagcagtttggaaacactctgtttgtaaagtctgcacgtggatattttgaccatttagaggccttcgttggaaacgggtttttttcttgtaaggctagacagaagaattcccagtaacttccttgtgttgtgtacattcaactcacagagttgaacattcccttagacagagcagatttgaaacactctttttgtgcaattggcaagtggtgatttcagccgctttgaggtcaatggtagaaaaggaaatatcttcgtataaaaactagacagaatgattctcagaaactcctttgtgatgtgtgagttcaactcacagagtttatcctttcttttcatagagcagttaggaagcactctgtttgtaaagtctgcaagtggatattcagacctctttgaggccttcgttggaaacgggatttcttcatattctgctagacagaagaattctcagtaacttccttgtgttgtgtgcattcaactcacagagttgaacgatcctttacacagggcagacttgaaacactctttttgtggaatttgcaagcggacatttcagcctctttaaggttaatggtagaaaatgaaatatcttcgtatagaaactagacagaatgattctcagaaactcctttgtgatgtgtgcgttcaactcacagagttgaacctttcttttcatagagcagttaggaaacactctgtttgtaaagtctgcaagtggatattcagacatccttgaggctttcgttggaaacaggatttcttcatattctgctagaaagaagaattcccaataacttccttgtgttgtgtgtgttcaactcacagagttgaactttcatttacacagagcagatttgaaacactctttttgtggaatttgcaagtggagatttcaagcgctgtgaggccaaaggcagaaaaggaaatatcttcgtataaaaactagacagaatcattctcagaaactgctgcgtgatgtgtgcgttcaactctcagagtttaagttttcttttcattcagcggtttggaaacactctgtttgtaaagtctgcacgtggatattttgaccacttagaggccttcgttggaaacgggtttttttcatgtaaggctagacagaagaattcccagtaacttccttgtgttgtgtgcattccactcacagagttgaacgttcccttagacagagcagatttgaaacactctatttgtgcaatttgtaagtgtagatttcaagcgctttaaggtcaatggcagaaaaggaaatatcttcgtttcaaaactagacagaatgattctcagaaacttcattgtgttgtgagcgttcaactcacagagtttaacctttcttttcatagagcagttaggaaacactctgtttgtaaactctgcaagtggatattcagacctctttgaggccttcgttggaaacgggatttcttcatactgtgctagacagaacaattctcagtaacttccttgtgttgtgtgtattcaactcacagagttgaacgatcctttacacagagcggacttgaaacactctttttgtggaatttgcaagtggagatttcagccgcgttgaggtcaatggtagaaaaggaaatatcttcgtataaaaagtagacagaatgattctcagaaactcctttgtgatgtgtgtgttcaactcacagagtttaacctttcttttcatagagcagttagtaaacactctctttataaagtctgcaagtggatattcagacccctttgaggccttcgttggaaacgggatttcttcatattatgctagacagaagaattctcagtaacttccttgtgttgtgtgtattcaactgacagagttgaacattcatttggagagagcagatttgaaacactgtttttgtggaatttgcaagtggagatttcaagcgctttggggccaaaggcagaaaaggaaatatcttcgtataaaaactagacagaatgattctcagaaactcctttgtgatgtgtgcgttcaactctcagagtttaacttttcttttcattcagcagttcggaaacactctgtttgtaaagtctgcacgtggatattttgaccacttagaggccttcgttggaaacgggtttttttcctgtaaggctagacagaagaattcccagtaacttccttgtgttgtgtgcattcaactcacagagttgaacgttcccttagacagagcagatttgaaacactctatttgtgcaatttgcaagtgtagatttcaagcgctttaagagtcaatggcagaaaaggaaatatcttcatctcaaaactagacagaatgattctcagaaactcctttgagatgtgtgcgttcaactcacagagtttaacctttcttttcatagagcagttaggaaacactctgtttgtaaattctgcaagtggatattcagacctctttgaggccttcgttggaaacgggatttcttcatattatgctagacagaaggattctcagtaacttccttgtgttgtgtgtattcaactcacagagttgaacgatcctttacacagagcagacttgaaacactctttttgtggaatttgcaagtggagatttcagccgctttgaggtcaatggtagaaaaggagatatcttcgtataaaaactagacagaatgattctcagaaactctttgggatgtgtgcgttcaactcacagagtttaacttttcttttcatagagcagttaggaaacactctgtttgtaaagtctgcaagtggatattcagacctctttgaggccttcgttggaaacgggatttcttcatattatgctagacagaagaattctcagtaacttccttgtgttgtgtgtattcaactcacagagttgaaggatcctttacacagagcagactagaaacattctttttgtggaatttgcaagtggagatttcagccgctttgaggtcaatggtagaatgggaaatatcatcctatagaaactagacagaatcattctcagaaactgctgcgtaatgtgtgcgttcaactctcagagtttaacttttcttttcattcagcggtttggaaacactctgtttgtaaagtctgcacgtggaaattttgaccatttagaggccttcgttggaaacgggtttttttcatgtaaggctagacagaagaattcccagtaacttccttgtgttgtgtgcattcaactcacagagttgaacgatcctttacacagagcagacttgaaacactctttttgtggaatttgcaagtggagatttcagccgctttgaggtcaatggtagaaaaggaaactatcttcatataaagactagacagaatcattcccacaaactgcgttgtgaggtgttcgttcaactcacagagtttaacctttcttttcatagagcagttaagaaacagtctgtttgtaaattctgtaagtggatattctgacatcttgtggccttcgttggaaacgggatgtcttcatattctgctagacagaagaattctcagaatcttccttgtgttgtgtgtatttaactcacagagttgaacgatcctttacacagagcagacttgaaacactctttttgtggaatttgcaagtggagatttcagccgctttgaggtccatggtagaaaaggaaatatcttcgtataaaaactagacagaatgattctcagaaactcctttgtgatgtgtgcgttcaacacacagagttcaacctttcttttcctagagcagttgggaaacactctgtttgtaaagtctgcaagtggatattcagacttctttgaggccttcgttggaagcgggatttcttcatattctgctagacagaagaattcccagtaacttccttgtgttgtgtgtgttcaactcacagagttgaactttgatttacacagagcagatttgaaacactctttttgtggaatttgcaagtggagatttcaagcgctttgaggccaaatgcagaaaaggaaatatcttcgtataaaaactagacagaatcattctcagaaactgctctgcgatgtgtgcgttcaactctcagagtttaacttttcttttcattcagcagtttggaaacactctgtttgtaaagtctgcaggtggataatttgaccacttagaggccttcgttggaaacgggtttttttcctgtaaggctagacagaagaattcccagtaacttccttgtgttgtgtgcattcaactcacagagttgaaagttcccttcgacagagcagatttgaaacactctatttgtgcaatttgcaagtgtagatttcaagcgctttaaggtcaacggcagaaaaggaaatatcttcgtttcaaaactagacagaatcattcccacaaactgcgttgtgatgtgttcgttcaactcacagagtttaacctttctgttcatagaggagttaggaaacactctgtttgtaaagtctgtatgtggatattctgacatcttgtggccttcgttggaaacgggatttctttatattctgctagacagaacaattctcagtaacttccttgtgttgtgtgtattcaactcacagagttgaacgatcctttacacagagcggacttgaaacactctttttgtggaatttgcaagcggagatttcagctgcgttgaggtcaatggtagaaaaggaaatatcttcgtataaaaactagacagaatgattctcagaaacttcattgtgatgtgtgcgttcaactcacagagtttaacctttcttttcatagagcagttaggaaacactgtttgtaaactctgcaagtggatattcagacctctttgaggccttcgttggaaacgggatttcttcatactgtgctagacagaagaattcccagtaacttccttgggttgtgtgtgttcaactcacagagttgaactttcatttacacagagcagatttgaaacactctttttgtggaatttgcaaatggagatttcaagcgctttgaggaaaaaggcagtaaagggaatatcttcgtataaaaactagacagaatcattctcagaacctgctctgtgatgtgtgcgttcaactctcagagtttaacttttcttttcattcagcagtttggcaacactctgtttgtaaagtctgcacgtggataatttgaccacttagaggccttcgttggaaacgggtttttttcatgtaaggctagacagaagaattctcagtaacttccttgtgttgtgtgtattcaactcacagagttgaacgatcctttacacagagcagacttgtaacactctttttgtggaatttgaaagtggagatttcagccgctttgaagtcaaaggtagaaaaggaaatatcttcctataaaaactacacagaatcattcccaaaaactgcgttgtgatgtgttcgttcatctcacagagtttaacctttcttttcatagagcagttaggaaacactctgtttgtaaattctgtaagtggatattctgacatcttgtggccttcgttggaaacgggatttcttcatattctgctagacagaagaattctcagtaacttccttgtgttttgtgtattcaactcacatagttgaacgatcctttacacagagcagacttgaaacactctttttgtggtatttgcaagtggagatttcagccactttgaggtcaatgttagaaaaggaaatatcttcgtataaaaactagacagaatgattctcagaaactcctttgtgatgtgtgcgttcaactcacacagtttaacctttcttttcatagagcagttaggaaacactctgtttgtaaagtctgcaagtggatattcagacctccttgaggccttcgttggaaacgggatttgttcatattatgctagacagaagaattctcagtaacttccttgtgttgtgtgtattcaactgacagaattgaactttcatttagagagagcagatttgaaacactgtttttgtggaatttgcaagtggagatttcaagcgctttggggccaaaggcagaaaaggaaatatcttcgtataaaaactagacagaaatcattctcagaaactgctgcgtgatgtgtgcgttcacctctcagagtttaacttttcttttcattcagcggtttggaaacactctgtttgtaaagtctgcacgtggaaattttgaccacttagaggccttcgttggaaacgggtttttttcatgtaaggctagacagaagaattcccagtaacttccttgtgttgtgtgcattcaactcacagagttgaacgttcccttagacagagcagatttgaaacactctatttgtgcaatttgcaagtgtagatttcaagcgctttaaggtcaatgacagaaaaggaaatatcttcgtttcaaaactagacagaatgattctcaaaaactcctttgtgatgtgtgcgttcaactcacagagtttaacctttcttttcatagagcagttaggaaacactctggttgtaaagtctgcaagtggatattaagacctctttgaggccttcgttggaaacgggatttcttcatattctgctagacagaagaattctcagtaacttccttgtgttgtgtgtattcaactcacagagttgaacgatcctttacacagagcagacttgaaacactctttttctggaatttgcaagtggagatttcagccgctttgaggtcaatggtaggataggaaatatcttcctatagaaactagacagaatgattctcagaaactcctttgtgatgtgtgcgttcaactcacagagtttaacctttcttttcatagagcagttaggaaacactctgtttgttaagtctgcaagtggatattcagacctccttgaggccttcgttggaagcgggatttcttcatattctgctagacagaagaattcccagtaacttccttgtgttgtgtgtgttcaactcacagagctgaactttcatttacacagagcagatttgaaacactctttttgtggaatttacaaatggagatttcaagcgctttgaggccaaaggcagaaaaggaaatatcttcgtttcaaaactagacggaatgattctcagaaactgctctgcgatgtgtgcgttcacctctcagagtttaacttttcttttcattcagcagtttggaaacactctgtttgtaaagtctgcacgtgcataatttgaccacttagaggccttcgttggcaacgggtttttttcatgtaaggctagacagaagaattcccaggaacttccttgtgttgtgtacattcaactcacagagttgaacgttcccttagacagagcagatttgaaacactctttttgtgcaatgggcaagtggtgatttcagccgctttgaggtcaatggtagaaaaggaaatatcttcgtataaaaactagacagaatgattctcataaactcctttgtgatgtgcgcgttcaactcacagagtttaacctttcttttcatagagcagttaggaaacactctgtttgtaaagtctgcaagtggatattcagacctctttgaggccttcgttggaaacgggatttctttatattctgctagacagaagaattctcagtaacttccttgtgttgtgtttattcaactcacagagttgaatgttcctttacacagagcagacttgaaacactctttttgtggaatttgcaagtggagatttcagccgctttgaggtcaatggtagaaaagtaaatatcttcgtataaagactagacagaatgattctcagaaacttctttgtgatgtgtgcgttcaactcacagagtttaacctttcttttcatagagcagttaggaaacactctgtttctaaactctgcaagtggatattcagacctctttgaggccttcgttggaaacgggatttcttcatactatgctagacagaagaattctcaagtaacttccttgtgttgtgtgtattcaactcacagagtttaacgatcctttacacagagcagacttgtaacactctttttgtggaatttgcaagtggagatttcagccgctttgaagtcaaaggtagaaaaggaaatatcttcctataaaaactagacagaatcattctcagaaactgctctgcgatgtgtgcgttcaactcacagagtttaacttttcttttcattcagcagtttggaaacactctgtttgtaaagtctgcacgtggataatttgaccacttagaggccttcgttggaaacgggtttttttcatgtaaggctagacagaagaattcccagtaacttccttgtgttgtgtgcattcaactcacagagttgaactttcccttagacggagcagatttgaaacactctatttgtgcaatttgcaagtgtagatttcaagcgctttaaggtcaatggcagaaaaggaaatatcttcgtttcaaaactagagagaatcattcccacaaactgcgttgtgatgtgttcgttcaactcacagagtttaacctttctgttcatagagcagttaggaaacactctgtttgtaaagtctgtaagtggatattccgacctccttgaggccttcgttggaaacgggatttcttcatattctgctagacagaagaattctcagaaacttcctggtgttgtgtgttttcaactcacagagttcaacgatcctttacacagagtagacttgaaacactctttttgttgaattggcaagtggagatttcagctgctttgaggtcaatggtagaaaaggaaatatcttcgtacaaaaactagacagaatgattctcagaaaatcctttgtgatgtgtgcgttcaactcacagagtttaacttttcttttcatagagcagttaggaaacactctgtttgtaaagtctgcaagtggatattcagaccactttgaggccttcattggaaacgggatttcttcatattgtgctagacggaagaattctcagaaacttccttgtgttgcgtgttttcaactcacagagttcaacgatccgttacacagagtagacttgaaaaactctttttgttgaattggccagtggagatttcagccgctttgaggtcaatggtagaaaaggaaatatcttcgtataaaaactagacagaatcattctcagaaacggctctgcgatgtgtgcgttcaactctcagagtttaacttttcttttcattcagcagtttggaaacactctgtttgtaaagtctgcacgtggatattttgaccacttagaggccttcgtttgaaacgggtttttttcctttaaggctagagagaagaattcccagtaacatccttgtgttgtgtgtgttcaactcacagagttgaactttcatttacacagagcagatttgaaacactctttttgtggaatttgcaagtggagatttcaagcgctttgaggccaaaggcagaaaaggaaatatccttcgtttcaaaactagacagaagcattctcagaagctgctctgcgatgtgtgcgttcaactctcagagtttaacttttcttttcattcagcagtttggaaacactctgtttgtaaagtctgcacgtggataatttgaccacttagaggccttcgttggaaacgggtttttttcatgtaaggctagacagaagagttctcagtaacttccttgtgttgtgtgtattcaactcacacagttgaacgatcctttacacagagcagacttgtaacactctttttgtggaatttgcaagtggagatttcagccgctttgaagtcaaagtagaaaaggaaatatcttcctataaaaactagacagaatgattctcagaaacttctttgtgatgtgtgcgttcaactcacagagtttaacctttcttttcatagagcagttaggaaagactctgtttgtaaagtctgcaagtggatattcagacctctttgaggccttcgttggaaacgggtttttttcatataaggctagacagaagaattctcagtaacttccttgtgttgtgtgtattcaactgacagagttgaactttcatttagagagagctgatttgaaacactgtttttgtggaatttgcaagtggagatttcaagcgttttggggccaaaggcagaaaaggaaatatcttcgtataaaaactagacagaatcattctcagaaactgctgcgtgatgtgtgcgttcaactctcagagtttaacttttcttttcattcagcggtttggaaacactctgtttgtaaagtctgcacgtggatattttgaccacttagaggccttcgttggaaacgggttttttttcatgtaaggctagacagaagaattcccagtaacttccttgtgttgtgtgcattcaactcacagagttgaacgttcccttacacagagcagatttgaaacactctatttgtgcaatttgcaagtgtagatttcaagcgctttaaggtcaacggcagaaaaggaaatatcttcgtttcaaaactagacagaatcattcccacaagctgcgttgtgatgtgttcgttcaactcacagagtttaacctttctgttcatagagcagttaggaaacactctgtttgtaaagtctgtaagtggatattctgacatcttgtggccttcgttggaaatgggatttcttcatattctgctggacagaagaattctcagtaacttccttgtgttgtgtgtattcaactcacagagttgaacgatcctttacacagagcagacttgaaacgctctttttgtggaatttgcaagtggagatttcagccgcgttgaagtcaatggtagaaaaggaaatatcttcgtataaaaactagacagaatgattttcagaaactcctttgtgatgtgtgcgttcaattcacagagtttaacttttcatagagcagttaggaaacactctgtttgtaaagtctgcaagtggatattcagacctctttgaggccttcgttggaaacgggatttcttcatattatgctagacagaataattctcagtaacttccttgtgttgtgtgtattcaactcacagatttgaacgatcctttacagagagcagacttgaaacactctttttgtggaatttgcaagtggagatttcagctgctttgaggtcaatggtagaaaaggaattatcttcgtagaaaaactagacagaatcattctcagaaactgctgcgtgatgtgtgcgttcaactgtcagagtttaacttttcttttcattcagcggtttggaaacactctgtttgtaaagtctgcacgtggatattttgcccacttagaggccttcgttggaaacgggtttttttcatgtaaggctagacagaagaattcccagtaacttccttgtgttgtgtgcattcaactcacagagttgaacgttcccttagacagagcagatttgaaacactctatttgtgcaatttgcaagtgtagatctcaagcgctttaaggtcaatgggagaaaaggaaatatcttcgtttcaaaactagacagaatcattcccacaaactgcgttgtgatgtgttcgttcaactcacagagtttaacctttcttttcatagagtagttaggaaacagtctgtttgtaaattctgtaagtggatattctgacatcttgtggccttcgttggaaacgggatttcttcatattctgctagacagaagaattctcagtaacttccttgtgttgtgtgtattcaactcacagagttgaacgatcctttacacagagcagacttgaaacactctttttgtggaatttgcaagtggagatttcagccgctttgaggtcaatgttagaaaaggaaatatcttcctatagaaactagacagaatgattctgagaaactcctttgtgatgggtgcgttcaactcacagagtttaacctttcttttaatagagcagttaggaaacactctgtttgtaaagtctgcaagtggatattcagacatctttggggcattcgttggaaacgggatttcttcatattctgctagacagaagaattctcagtaacttccttgtgttgtgtgtattcaactgacagagttgaactttcatttagagagagcagatttgaaacactatttttgtggaatttgcaagtggagattacaagcgcttttgggccaaaggcagaaaaggaaatatcttcgtataaaaactagacagaatcattctcagaaactgctctgcgatatgtgcgttcaactctcagagtttaacttttcttttcattcagcagtttggaaacactctgtttgtaaagtctgcatgtgcgtaatttgaccacttagaggccttcgttggaaacaggttttgttcatgtaaggctagacagaagaattcccagtaacttaccttgtgttgtgtacattcaactcacagagttgaacgttcccttagacagagcagatttgaaacactctttttgtgcaattggcaagtggagatttcaagcgctttaaggtcaatggcagaaaaggaaatatcttcgtttcaaaactagacagaatcattcccacaaacttcgttgtgatgtgttcgttcaactcacagagtttaacctttctgttcatagagcagttaggaaacactctgtttgtaaagtctgtaagtggatattctgacatcttgtggccttcgttggaaacgggatttcttcatattctgctagacagaagaattctcagaaccttccttgtgttctgtgcattcaactcacagagttgaacgatcctttacacagagcagacttgaaacactctttttgaggaatttgcaagtggagatttcagccgctttgaggtccatggtagaaaaggaaatatcttcgtataaaaactagacagaatgattctcagaaagtccgttgtgatgtgtgcgttcaactcacagagtttaacctttcttttcatagagcagttaggaaacactctgtttgtaaagtctgcaagtggatattcagacctctttgaggccttcgttggaaacgggatttcttcatattatgctagacagaagaattcccagtaacttccttgtgttgtgtgtgttcaactcacagagttgaactttcatttacacagagcagatttgaaacactctttttatggaatttgcaaatggagatttcaagcgctttgaggccaaaggcagaaaaggaaatatcttcgtataaaaactagacagaatcattctcagaaactgctgcgtgatgtgtgcgttcaactctcagagtttaacttttcttttcattcagcggtttggaaacactctgtttgtaaagtctgcacgtggatattttgaccacttagaggccttcgttggaaacgggttttttacatgtaaggctagacagaagaattcccagtaacttcccttgtgttgtgtacattcaactcacagagttgaacgttcccttagacagagcagatttgaaacactctttttgtgcaattggcaaatggagatttcaagcgctttaaggtcaatggcagaaaaggaaatatcttcgtttcaaaactagacagaatcattcccacaaactgcgttgtgatgtgttcgttcaactcacagagtttaacctttcttttcatagagcacttaggaaagagtctgtttgtaaattctgtaagtggatattctgacatcttgtggccttcgttggaaacgggatttcttcatattctgctagacagaagaattctcagaaacttccttgtgttgtgtgttttcaactcacagaattgaacgatgctttacacagagtagacttgaaacactctttttgtgtaatttgcaagtggagatttcagccgctttgaggtcaatggtagaaaaggaaatatcttcgtataaaaactagacagaatgattctcagaaactcctttgtgatgtgggcgttcaactcacagagtttaacctttcttttcatagagcagttaggaaacactctgtttgttaagtctgcacgtggatacttggacttctttgaggccttcgttggaaacgggtttttttcatgtaaggctggacagaagaattctcagtaacttccttgtgttgtgtgtattcaactcacagagttgaatgatcctttacagagagcagacttgaaacactctttttgtggaatttgcaagtggagatttcagccgctttgaggtcaatggtagaataggaaatatcttcctatagaaactagacagaatcattctcagaaactgctctgcgatgtgtgcgttcaactctcagagtttaactttgcttttcattcagcagtttggaaacactctgtttgtaaagtctgcacgtggataatttgaccacttagaggccttcgttggaaacgggtttttttcatgtaaggctagacagaagaattcccagtaacttgccttgtgttgtgtgcattcaactcacagagttgaacgttcccttagacagagcagatttgaaacactctagttgtgcaatttgcaagtgtagatttcaagcgctttaaggtcaatggcagaaaaggaaatatcttcgtttcaaaactagacagaaatgattctcagaaactcctttgtgatgtgtgcgttcaactcacagagtttaacctttcttttcatagagcagttaggaaacactctgtttgtaaagtctgcaagtggatattcagacctccttgaggccttcgttggaaacgggatttcttcatattatgctagacagaagaattctcagtaaattccttgtgttgtgtgtattcaactcacagagttgaacgatcctttacacagagcagacttgaaacactctttttgtgaaatttgcaagtggagatttcagccgctttgtggtcaatggtagaataggaaatatcttcctatagaaactagacagaatgattctcagaaactcctttgtgatgtgtgtgttcaactcacagagtttaacctttcttttcatagaacagttagtaaacactctgtttataaagtctgcaagtggatattcagacccctttgaggccttcgttggaaacgggatttcttcatattatgctagacagaagaattctcagtaacttccttgtcttgtgtgtattcaactcacagagttgaacgatcctttacacagagcagacttgaaacactccttttgtggaatttgcaagtggagatttcagccgctttgaggtcaatggtagaataggaaatatcttcctatagaaactagacagaatgattctcagaaactcctttgtgacgtgtgtgttcaactcacagagtttaacctttcttttcatagagaagttagtaaacactctgtttataaagtctgcaagtggatattcagacccctttgaggccttcgttggaaacgggatttcttcatattatgctagacagaagaattcccagtaacttccttgtgttgtgtgtgttcaactcacagagttgaactttcatttacacagaacagatttgaaacactctttttgtggaatttgcaagtggagatttcaagcgctttgaggccaaaggcagaaaaggaaatatcttcgtttcaaaactagacagaatcattctcagaaactgctctgtgatgtgtgcgttcaactctcagagtttaacttttctgttcattcagcagtttggaaacactctgtttgtaaagtctgcacgtggataatttgaccacttagaggccttcgttggaaacgggtttttttcatgtaaggctagacagaagagttctcagtaacttccttgtgttgtgtgtattcaactcacacagttgaacgatcctttacacagagcagacttgtaacactctttttgtggaatttgcaaatggagatttcagccgctttgaagtcaaagtagaaaaggaaatatcttcctataaaaactagacagaatcattcccacaaactgcgttgtgatgtgttcgttcaactcacagagtttaacctttcttttcatagagcagttaggaaacagtctgtttgtaaattctgtaagtggatattgtgacatcttgtggcctttgttggaaacgggatttcttcatattctgctagacagaagaattctcagtaacttccttgtgttgtgtgtattcaactcacagagttgaacggtcctttacacagagctgacttgaaccactctttttgtgggatttgcaagtggagatttcagccgctttcaggtcaatggtagaataggaaatatcttcctatagaaactagacagaatgattctcagaaactcctttgtgatgtgtgtgttcaactcacagagtttaacctttcttttcatagagcagttagtaaacactctgtatataaagtctgcaagtggatattcagacccctttgaggccttcgttggaaacgggatttcttcatattatgctagacagaagaattctcagtaacttccttgtgttgtgtgtattcaactgacagagttgaactttcatttggagagagcagatttgaaacactgtttttgtggaatttgcaagtggagatttcaagcgctttggggccaaaggcagaaaaggaaatatcctcgtataaaaacatgacagaaatcattctcagaaaccgctctgtgatgtgtgcgttcaactctcagagtttaacttttctttccattcagcagtttggaaacactctgtttgtaaagtctgcacgtggatattttgaccacttagaggtcttcgttggaaacgggtttttttcatgtaaggctagacagaagaattcccagtaacttccttgtgttgtgtgcattcaactcacagagatgagcgttcccttagacagagcagatttgaaacactctatttgtgcaatttgcaagtgtagatttcaagcgctttaaggtcaatggcagaaaaggaaatatcttcgtttcaaaactagacagaatcattcccacaaactgcgttgtgatgtgttcgttcaactcacagagtttaacctttcttttcatagagcagttaggaaacagtctgtttgttaattctgtaagtggatattctgacatcttgtggccttcgttggaaacgggatttcttcatattctgctagacagaagaattctcagtaacttccttgtgttgtgtgtattcaactcacagagttgaatgatcctttacacagtacagtcttgaaacactctttttgtggaatttgcaagtggagatttcagccgctttgaggtcaatggtagaataggaaataccttcctatagaaactagacagaatgattctcaaaaacttctttgtgatgtgtgcgttcaactcacagagtttaacctttcttttcatagagcagttaggaaacactctgtttgtaaactctgcaagtggatattcagacctgtttgaggccttcgttggaaacgggatttcttcatactatgctagacagaagaattctcagtaacttccttgtgttgtgtgtattcaactgacagagttgaactttcatttagagagagcagatttgaaacactgtttttgtggaagttgcaagtggagatttcaagcgctttggggccaaaggcagaaaaggaaatatcttcgtataaaaactagacagaatcattctcagaaactgctgcgtgatgtgtgcgttgaactctcagagtttaacttttcttttcattcagcggtttggaaacactctgtttgtaaagtctgcacgtggaaattttgaccacttagaggccttcgttggaaacgggattttttcatgtaaggctagacagaagaattcccagtaacttccttgtgttgtgtgcattcaactcacagagttgaacgttccgttagacagagcagatttgaaacactctatttgtgcaatttgcaagtgtagatttcaagcgctttaaggtcaatggcagaaaaggaaatatcttcgtttcaaaactagacagaatcattcccacaaactgcgttgtgatgtgttcgttcaactcacagagtttaacctttctgttcatagagcagttaggaaacactctgtttgtaatgtctgtaagtggatattctgacatcctgtggccttcgttggaaacgggatttcttcatattctgctagacagaagaattctcagtaactgccttgtgttgtgtgtattcaactcacagagttgaacgatcctttacacagagcagacttgaaacactccttttgtggaatttgcaagtggagatttcagctgctttgaggtcaatggtagaataggaaatatcttcctatagaaagtagacagaatgattctcagaaactcctttgtgatgtgtgcgttcaactcacagagtttaccctttcttttcatacagcagttgggaaacactctgtttgtaaagtctgcaagtggatattcagacctccttgaggctttcgttggaaacgggatttcttcatattctgctagaaagaagaattcccagtaacttccttgtgttgtgtgtgttcaactcacagagttgaactttcatttacacagagcagatttgaaactctctttttgtggaatttccaagtggagatttcaagcgctttgaggccaaaggcagaaaaggaaatatcttcgtttcaaaactagacagaatcattctcagaaactgcactgcgatgtgtgcgttcaactctcagagtttaacttttcttttcattcagcagtttggaaacactctgtttgtaaagtctgcacgtggataatttgaccacttagaggccttctttggaaacgggtttttttcatgtaaggctagacagaagaattcccagtaacttcccttgtgttgtgtgtgttcaactcacagagttgaactttcatttacacagagcagatttgaaacactctttttgtggaatttgcaagtggagatgtcaagcgctttgaggccaaaggcagaaaaggaaatatcttcgtttcaaaactagacagaatcattcccacaaactgcgttgtgatgtgttcgttcaactcacagagtttaacctttcttttcatagagcagttaggaaacactctgttggtaaattctgtaagtggatattctgacatcttgtggccttcagtggaaacgggatttcttcatattctgctagacagaagaattctcagaaacttccttgtgttgtgtgttttcaactcacagagttgaacgatgctttacacagagtagacttgaaacactctctttgtgtaatttgcaagtggagatttcagccgctttgaggtcaatggtagaaaaggaaatatcttcgtataaaaactagacagaatgattctcagaaactcctttgtgatgtgtgcgttcaactcacagagttcaacctttcttttcatagagcagttaggaaacactctgtttataatgtctgcaagtggatattcagacctctttgaggccttctttggaaacgggatttcttcatattctgctagacagaagaattcccagtaacttccttgtgttgtgtgtgttcaactcacagagttgaactttcatttgcacagagcagatttgaaacactctttttgtggaatttgcaagtggagatttcaagcgctttgaggccaaaggcagaaaagaaggaaatatattcgtataaaaactagacagaatcattctcagaaactgctctgcgatgtgtgcgttcaactctcagagtttaacttttcttttcattcagcagtttggaaacactctgtttgtaaagtctgcacgtggataacttgaccacttagaggacttcgttggaaacgggtttttttcctgtaaggctagacagaagaattcccagtaacttccttgtgttgtgtacattcaactcacagagttgaacgttccctaagacagagcagatttgaaacactctttttgtgcaattggcaagtggtgatttcagccgctttgaggtcaatggtataaaaggaaatatcttcgtataaaaactagacagaatcattcccacaaactgcgttgtgacgtgttcgttcaactcacagagtttaacctttcttttcatagagcagttaggaaacagtctgtttgtcaattctttaagtggatattctgacatattgtggccttcgttggaaacgggatttcttcatattctgctagacagaagaattctcagtaacttccctgtgttgtgtgtattcaactcacagagttgaacgatcctttacacagagcagacttgagacactctttttgtggaatttgcaagtggagatttcagccgctttgaggtcaatggtagaaaaggaaatatcttcgtataaaaactagacagaatgattctcagaaactcctttatgatgtgtgcgttcaactcacagagtttaacctttcttttcatagagcagttaggaaacactcagtttgtaatgtctgcaagtggataatcagacctctttgaggccttcgttggaaacgggatttcttcatattctgatagacagaagaattcccagtaacttcccttgtgttgtgtgtgttcaactcacagagttgaactttcatttacacagagcagatttgaaactctctttttgtggaatttgcaagtggagatttcaagcgctttgaggccaaaggcagaaaaggaaatatcttcgtttcaaaactagacagaatcattctcagaaactactctgcgatgtgtgcgttcaactctcagagtttaacttttcttttcattcagcagtttggaaacactctgtttgtaaagtctgcacgtggataacttgaccacttagaggccttcgttggaaacgggtttttttcacgtaaggctagacagaagaattcccagtaacttccttgtgttgtgtacattcaactcacagagttgaacgttcccttagacagagcagatttgaaacactctttttgtgcaattggcaagtggagatttcaagcgctttgtggtcaatggcagaaaaggaaatatcttcgtttcaaaactagacagaaatcattcccacaaactgcgttgtgatgtgttcgttcaactcacagtagtttaacctttctgttcatagagcagttaggaaacactctgtttgtaaagtctgtaagtggatattctgacatcttgtggccttcgttggaaacgggatttcttcatattctgctagacagaagaattctcagaaacttccttgtgttgtgtgtattcaactcacagagttgaatgatcctttacacagaacagtcttgaaacactctttttgtggaatttgctagtggagatttcagccgctttgaggtcaatggtagaataggaaatatcttcctatagaaactagacagaatgattctcagaaactcctttgtgatgtgtgtgttcaactcacagagttcaacctttcttttcatagagcagttgggaaacactctgtttgtaaagtctgcaagtggatattcagacctccttgaggctttcgttggaaacgggatttcttcatattctgctagacagaagaattctcagttacttccttgtgttgtgtgtattcaactcacagagttgaacgatcctttacacagagcagacttgaaacactctttttgtggaatttgcaagtggagatttcagccgctttgaggtcaatggtagaaaaggaaatatcttcgtataaaaaatagacagaatcattctcagaaactgctctgcgatgtgtgcgttcaactctcagagtttaacttttcttttcattcagcagtttggaaacactctgtttgtaaagtctgcacgtggataacttgaccacttagagtccttcgttggaaacgggtttttttcatgtaaggctagacagaagaattctcagtaacttccttgtgttgtgtgtattcaactcacagagttgaacggatcctttacacagagcagacttgaaatactctttttgtggaatttgcaagtggagatttcagccgctttgaggtcaatggtagaataggaaatatcttcctatagaaactagacagaatgattctcagaaactcctttgtgatgtgtgcgttcagctcacagagtttaacctttcttttcatagagcagttaggaaacactctgtttgtaaagtctgcaagtggatattcagacatccttgaggctttcgttggaaacgggatttcttcatattctgctagaaagaagaattctcagtaacttccttgtgttgtgtgtattcaactcacagagttcaacgatcctttacacagagcagacttgaaacactctttttgtggaatttgcaagtggagatttcagccgctttgagttcaatggtagaataggaaatatcttcctatagaaactagacagaacgattctcagaaactcctttgtgatgtgtgcgttcaactcacagagtttaacctttctgttcatagagcagttaggaaacactctgtttgtaaagtctgcaagtggatattcagacctctttgaggccttcgttggaaacgggatttcttcctattctgctagacagaagaattctcagtaacttccttgtgttgtgtgtattcaaatgacagagttgaatttcatttagagagagcagattggaaacactgtttttgtggaatttgcaagtggagatttcaagcgctttggggccaaatgcagaaaaggaaatatcttcgtataaaaactagacagaatcattctcagaaactgctgcgtgatgtgtgcgttcaactctcagagtttaacttttcttttcattcagcggtttggaaacactctgtttgtaaagtctgcacgtggatattttgaccacttagaggccttcgttggaaactggtttttttcatgtaaggctagacagaagaattcccagtaacttccttgtgttctgtacattcaactcacaggagttgaacgttcccttagacagagcagatttgaaacactctttttgtgcaattggcaagtggagatttcaagcgctttaaggtcaatggcagaaaaggaaatatcttcgtttcaaaactagacagaatgattctcagaaactcctttgtgatgtgtgcgttcaactcacagagttcagcctttcttttcatagagcagttgggaaacactctgtttgtaaagtctgcaagtggatattcagacttctttgaggccttcgttggaagcgggatttcttcatattctgctagacagaagaattctcagtaacttccttgtgttgtgtgtattcaactcacagagttcaacgatcctttacacagagtagacttgaaacactctttttgtggaattggcagggtggagatttcagccgctttgaggtcaatggaagaaaaggaaatatattcgtataaaaactagacagaatgattctcataaactcctttgtgatgtgtgcgttcaactcacagagtttaacttttcttttcatagagcagttaggaaacactctgtttgtaaagtgtgcaagtggatattcagacctctttgaggccttcgttggaaacgggatttctttatattatgctagacagaataattctcagtaagttccttgtgttgtgtgtattcaactcacagagttgaacgatcctttacacagagcagacttgaaacattctttttgtggaatttgcaagtggagatttcagccgctttgaggtcaatggtagaataggaaatatcttcctatagaaactagacagaatcattctcagaaacttctctgcgatgtgtgcgttcaactctcagagtttaacttttcttttcattcagcagtttggaaacactctgtttgtaaagtctgcacgtggatattttgaccacttagaggcattcgttggaaacgggatttttcctgtaaggctagacagaagaattcccagtaacttccttgtgttgtgtacattcaactcacagagttgaacgttcccttagacagagcagatttgaaacactctttttgtgcaattggcaagtggagatttcaagcgctttaaggtcaatggcagaaaaggaaatatcttattttcaaaactagacagaatcattcccacaaactgcgttgtgatgtgttcgttcaactcacagagtttaacctttctcttcatagagcagttaggaaacactctgtttgtgaagtctgtaagtggatattctgacatcttgtggccttcgttggaaacgggatttcttcatattctgctagacagaagaattctcagtaacttccttgtgttgtgtgaattcaactcacagagttgaacgatcctttacacagagcagacttgaaacacgctttctgtggaatttgcaattggagatttcagccgctttgaggtcaatggtagaataggaaatatcttcgtataaaaactagacagaatgattctcagaaactcctttgtgatgtgtgcgttcaactcacagagtttaacttttcttttcatagagcagttaggaaacactctgtttgtaaagtctgcaagtggatattcagacctctttgaggtcttcgttggaaacgggatttcttcatattctgctagacagaagaattctcagtaacttccttgtgttgtgtgtattcaactgacagagttgaactttcatttagagagagcagatttgaaacactgtttttttggatttgcaagtggagatttcaagcgctttggggccaaaagcagaaacgtaaatatcgtcgtataaaaactagacagaatcattctcagaaagtgctctgcgatgtgtgcgttcaactctcagagtttaactttgcttttcattcagcagtttggaaacactctgtttgtaaagtctgcacgtggataatttgaccacttagaggccttcgttggaaacgggtttttttcatgtaaggctagacagaagaattccccgtaacttccttgtgttgtgtgcattcaactcacagagttgaacgttcccttagacagagcagatttgaaacactctatttgtgcaatttgcaagtgtagttttcaagctctttaaggtcaacggcagaaaaggaaatatcttcgtttcaaaactagacagaatcattcccacaaactgcgttgtgatgtgttcgttcaactcacagagtttaacctttctgttcatagagcagttaggaaacactctgtttgtaaactctgtaagtggatattctgacatcttgtggccttcgttggaaacgggatttcttcatattctgctagacagaagaattctcagtaacttccttgtgttgtgtgtattcaactcacagagttgaacgatcctttacacagagcatacttgaaacactcttcttgtggaatttgcaagtggagatttcagccgctttgaggtcaatggtagaataggaaatatcttcctatagaaactagacagaatgattctcagaaactcctttgtgatgtgtgtgttcaactcacagagtttaacctttcttttcatagagcagttaggaaacactctgtttgaaaagtctgcaagtggatattcagacctccttgtggccttcgttggaaacgggatttcttcatattctgctagacagaagaattcccagtaactttccttgtgttgtgtgtgttcaactcacagagttgaactttcatttacacagagcagatttgaaacactctttttgtggaagttgcaagtggagatttcaagcgctttgaggccaaaggcagaaaaggaaatatcttcgtttcaaaactagacagaatcattctcagaaactgctctgcgatgtgtgcgttcaactctcagagtttaacttttcttttcattcagcagtgtggaaaaattctgtttgtaaagtctgcacgtggatattttgaccacttagaggccttcgttggaaacgggtttttttcctgtaaggctagacagaagaattcccagtaacttccttgtgttgtgttcattcaactcacagagttgaacgttcccttagacagagcagatttgaaacactctttttgtgcaattggcaaatggagatttcaagcgctttaagttcaaaggcagaaaaggaaatatcttcgtttcaaaactagacagaatcattcccacaaactgcgttgtgatgtgttcgttcaactcacagagtttaacctttctgttcatagagcagttaggaaacactctgtttgtaaagtctgtaagtggatattctgacatattgtggccttcgttggaaacgggatttcttcatattctgctagacagaataattctcagtaacttccttgtgttgtgtgtattcaactcacagagttgaaggatcctttacagagagcaggcttgaaacactctttttgtcgaatttgcaagtggagatttcagccgctttgaggtcaatggtagaataggaaatatcttcttatagaacctagacaaaatgattctcagaaactcctttgtgatgtgtgtgttcaactcacagagtttaaccttgcttttcatagagcagttagtaaacactctgtttataaagtctgcaagtggatattcagacccctttgaggccttcgttggagacgggatttcttcatattatgctagacagaagaattcccagtaacttccttgtgttgtgtgtgttcaactcacagagttgaactttgatttacacagagcagatttgaaacactctttttgtggaatttgcaagtggagatttcaagcgctttcaggccaaaggcagaaaaggaaatatgttcgtataaaaactagacagaatcattctcagaaactgctctgcgatgtgtgcgttcaactctcagagtttaagttttcttttcattcagcagtttggaaacactctgtttgtaaagtctgcacgtggatattttgaccacttagaggccttcgttggaaacgggtttttttcgtgtaaggctagacagaagaattcccagtaacttccttgtgttgtgtgcattcaactcacagagttgaacgttcccttagacagagcagatttgaaacactctatttgtgcaatttccaagtgtagatttcaagcgctttaaggtcaacggcagaaaaggaaatatcttcgtttcaaaactagacagaatcattcccacaaactgcgttgtgatgtgttcgttcaaatcacagagtttaacctttcttttcatagagcagttaggaaacagtctgtttgtaaattctgtaagtggatattctgacatcttgtggccttcgttggaaacgggatttcttcatattctgctagacagaagaattcccagtaacttccttgtgttgttgtacattcaactcacagagttgaacgatcctttacacagagcagacttgaaacactctttttgtggaatttgcaagtggagatttcagccgctttgaggtccatggtagaaaaggaaatatcttcgtataaaaactagacagaaagattctcagaaactcctttgtgatgtgtgcgttcaactcacagagtttaacctttctgttcatagagcagttaggaaacactctgtttgtaaagtctgcaagtggatattcagacctctttgaggccttcgttggaaacgggtttttttcatataaggctagacagaagaattctcagtaacttccttgtgttgtgtgtattcaactgacagagttgaactttcatttggagagagcatttttgaaacactgtttttgtggaatttgcaagtggagatttcaagcgctttggggccaaaggcagaaaaggaaatatcttcgtataaaaactagacagaacgattctctgaaactcctttgtgatgtgtgcgttcaactcatagagtttaacctttctgttcatagagcagttaggaaacactctgtttgtaaagtctgcaagtggatattcagacctctttgaggcctacgttggaaacgtgtttttttcatgtaaggctagacagaagaattcccactaacttccttgtgttgtgtgcattcaactcacagagttgaacgttcccttagacagagcagatttgaaacactctatttgtgcaatttgcaagtgtagatttcaagcgctttaaggtcaacggcagaaaaggaaatatcttcgtttcaaaactagacagaatcattcccacaaactgcgttgtgatgtgttcgttcaactcacagagtttaacctttcttttcatagagcagttattaaacagtctgtttgtcaattctgtaagtggatattctgacatcttgtggccttcgttggaaacgggatttcttcatattctgctagacagaagaattctcagtaacttccttgtgttgtgtgaattcaactcacagagttgaacgatcctttacacagagcagacttgaaacactctttttgtggaatttgcaagtggagatttcagccgctttgttgtcaatagtagaataggaaatatcttcctatagaaactatacagaatgattctcagaaactcctttgagatgtgtgcgttcaactcacagagtttaacctttcttttcatagagcagttaggaaacactctgcttgtaaagtctgcaagtggatattcagccctctttgaggccttcgttggaaacgggtttttttcatataaggctagacagaagaattcccagtaacttccttgtgttgtgggtgttcgactcacagagttgaactttcatttacacagagcagatttgaaacactctttttgtggaatttgcaagtggagatttcaagcgctttgaggccaaaggcagaaaaggaaatatcttcgtttcaaaactagacagaatcattctcagaaactgctctgcgatgtgtgcgttcaactctcagattttaacttttcttttcattcagcactttggaaacactctgtttgtaaagtctgcacgtggatattttgaccacttagaggccttcgttggaaacgggtttctttcttgtaaggctagacagaagaattcccagtaacttccttgtgttgtgtacattcaactcacagagttgaacgttcccttagacagagcagatttgaaacactctttttgtgcaattggcaagtggagatttcaagcgctttaaggtcaatggcagaaaaggaaatatcttcctttcaaaactagacagaatgattctcagaaacttctttgtgatgtgtgcgttcaactcacggagtttaacctttcttttcatagagcagttaggaaacactctgtttgtaaactctgcaagtggatattcagacctctttgaggtcttcgttggaaacgggatttcttcatactatgctagacagaagaattctcagtaacttccttgtgttgtgtgtattcaactcacagagttgaacgatcctttacagagagcagacttgaagcactctttttgtggaatttgcaagtggagatttcagccgctttgaggtcaatggtagaataggaaatatcttcctatagaaactagacagaatgattctgagaaactcctttgtgatgtgtgcgttcacctcacagagtttaacctttcttttcatagagcagttaggaaacactctgtttgtaaagtctgcaagtggatattcagacctccttgaggccttcgttggaaacgggatttcttcatattatgctagacagaagaattcccagtaacttccttgtgttgtgtgtgttcaactcacagagttgaactttcatttacacagagcagatttgaagcactctttttgtggaatttgcaagtggagatttcaagcgctttgatgccaaaggcagaaaaggaaatatcttcgtataaaaactagacagaatcattctcagaaactgctctgcgatgtgtgcgttcaactctcagagtttaacttttcttttcattcagcagtgtggaaaaactctgtttgtaaagtctgcacgtggatattttgaccacttagaggccttcgttggaaacgggtttttttcctgtaaggctagacagaagaattcccagtaacttccttgtgttgtgtacattcaactcacagagttgaaggttcccttaaacagagcagacttgtaacactctttttgtggaatttgcaagtggagatttcagccgctttgaagtcaaaggtagaaaaggaaatatcttcctataaaaactagacagaatgattctcagaaactcctttgtgatgtgtgcgttcaactcacagagttcaacctttgttttcatagagcagttgggaaacactctgtttgtaaagtctgcaagtggatattcagacttctttgaggccttcgttggaagcgggatttcttcatattctgctagacagaagaattctcagtaacttccttgtgttgtgtgtattcaactcacagagttgaatgatcctttacacagagcagacttgaaacactctttttgtggaatttggaagtggagatttcagcccgctttgagttcaatggtagaataggaaatatcttcctatagaaactagacagaatgattcacagaaactcctttgtgatgtgtgcgttcaactcacagagtttaacctttcttttcatagagcagttaggaaacactctgtttgtaaagtctgaaagtggatattcagacatctttgaggccatcgttggaaacgggatttctacatattctgctagagagaagaattctcagtaacttcgttgtgttgtgtgtattcaactcacagagttgaacgatcctttacacagaacagacttgaaacactctatttgtggaatttgcaagtggagatttcagccgctttgaggtcaatggtagaataggaaatatcttcctatagaaactagacagaatgattctcagaaactcctttgtgatgtgtgcgttcaactcacagagtttaacttttcttttcattcagcagtttggaaacactctgtttgtaaagtctgcacgtggctattttgaccacttagattccttcgatggaaacgggtttttttcatgtaaggctagacagaagaattcccagtaacttccttgtgttgtgtacattcaacacacagagttgaacgttcccttagacagagcagatttgaaacactctttttgtgcaattggcaagtggagatttcaagcgctttaaggtcaatggcagaaaagtaaatatcttcgtttcaaaactagacagaatcattcccacaaactgcgttgtgatgtgttcgttcaacccacagagtttaaccattcttttcatagagcagttaggaaacactctgtttgtaaattctgtaagtggatattctgacatcttttggccttcgttggaaacgggatttcttcatattctgctagacagaagaattctcagaatcttccttgtgttgtgtgtcttcaactcacagagttgagcgatggtttacacagagcagatttgaaacactctttttgtggaatttgcaagtggagatttcagccgctttgaggtcaatggtagaaaaggaaatgtcttcgtataaaaactagacagaatgattctcagaaacttctttgtgatgtgtgcgttcaactcacagagtttaacctttcttttcatagagcagttaggaaacactctgtttgtaaactctgcaagtggatattcagacctctttgaggccttcgttggaaacgggatttcttcatattatgcctgagagaagaattctcagtaacttccttgtgttgtgtgtattcaactgacagagttgaactttcatttagagagagcagatttgaaacactgtttttgtggaatttgcaagtggagatttcaagcgctttggggccaaaggcagaaaaggaaatatcttcgtataaaaactagagagaatcattctcagaaactgctctgcaatgtgtgcgttcaactctcagagtttaacttttcttttcattcagcagtttggaaacactctgtttgtaaagtctgcacgtggataatttgaccacttagagaccttcattggaaacgggtttttttcctgtaaggctagacagaagaattcccagtaacttccttgtgttgtgtgcattcaactcacagagttgaacgttcccttagacagagcagatttgaaacactctatttgtgcaatttgcaagtgtagatttcaagcgctttaaggtcaacggcagaaatggaaatatcttcgtttcaaaactagacagaaatcattcccacaaactgcgttgtgatgtgttcgttcaactcacagtagtttaacctttctgttcatagagcagttaggaaacactctgtttgtaaagtctgtaagtggatattctgacatcttgtggccttcgttggaaacgggatttcttcatattctgctagacagaagaaatctcagaatcttccttgtgttgtgtgtattcaactcacagagttgaacgatcctttacacagagcagacttgaaacactctttttgtggaatttgcaagtggagatttcagccgctttgaggtccatggtagaaaaggaattatcttcgtataaaaagtagacagaatgattctcagaaactcctttgtgatgtgtgcgttcaactcacagtagtttaacctttcttttcatagagcagttaggaaacactctgtttgtaaagtctgcaagtggatattcagacttccttgaggccttcgttggaaacgggtttttttcatataaggctagacagaagaattctcagtaacttccctgtgttgtgtgtattcaactgacaaagtcgaactttcatttagagagagcagatttgtaacattgtttttgtggaatttgcaagtggagatttcaagcgctttggggccaaaggcagaaaatgaaatatcttcgtataaaaactagacagaatcattctcagaaactgctctgcgatgtgtgcgttcaactctcagagtttaacttttcttttcattcagcagtttggaaacactctgtttgtaaagtctgcacgtggatattttgaccacttagaggccttcgttggaaacgggtttctttcctgtaaggctagacagaagaattcccagtaacttccttgtgttgtgtacattcaagtcacagagttgaacgttcccttagacagagcagatttgaaacactctttttgtgcaattggcaagtggagatttcaagcgctttaaggtcaatggcagaaaaggaaatatcttcgtttcaaaactagacagaatcattcccacaaactgcgttgtgatgtgttcgttcaactcacagagtttaacctttcttttcatagagcagttaggaaacagtctgtttgtcaattctgtaagtggatattctgacagcttgtggccttcgttggaaacgggatttcttcatattctgctagacagaagaattctcagaatcttccttgtgttgtgtgtattcaactcacagagttgaacgatcctttacacagagcggacttgaaacactctttttgtggaatttgcaagtggagatttcagccgcgttgaggccaaaggcagaaaaggaaatatcttcgtttcaaaactagacagaatgattctcataaactcctttgtgatgtgtgcgttcaactcacagagtttaacctttcttttcatagagcagttaggaaacactctatttgtaaagtctgcaagtggatattcagacctccttgaggccttcgttggaaacgggatttcttcatattctgctagacagaacaattcccagtaacttccttgtgttgtgtgtgttcaactcacagagttgaactttcatttacacagagcagatttgaaacactctttttgtggaatttgcaagtggagatttcaagcgctttgaggtcaatggcagaaaaggaaatatcttcatataaaaactagacagaatcattctcagaaactgctctgcaatgtgtgcgttcaactctcagagtttaacttttcttttcattcagcagtttggaaacactctgtttctaaagtctgcacgtggatattttgaccacttagaggccttcgttggaaacgggtttttttcctgtaaggctagacagaagaattcccagtaacttccttgtgttgtgtacattcaactcacagagttgaacgttcccttagacagagcagatttgaaacactctttttgtgcaattggcaagcggagatttcaagcgctttaaggtcaatggcagaaaaggaaatatcttcgtttcaaaactagacagaatcattcccacaaactgcgttgtgatgtgttcgttcaactcacaggagtttaacctttcttttcatagagcagttaggaaacagtctgtttgtaaattctgtaaatggatattctgacatcttgtggccttcgttggaaactggatttcttcatactatgctagacagaataattctcagtaacttccttgtgttgtgtgtattcaactcacagagttgaacgatcctttacacagagcagacttgaaacattctttttgtggaatttgcaagtggagatttcagccgctttgaggtcaatggtagaataggaaatatcttcctatagaaactagacagaatgattctcagaaactcctttgtgatgtgtgtgttcaactcacagagtttaacctttcttttcatagagcagttagtaaacactctgtttataaagtctacaagtggatattcagacccctttgaggccttcgttggaaacgggatttcttcatattatgctagacagaagaattcccagtaacttccttgtgttgtgtgtgttcaactcacagagttgaactttcatttacacagagcagatttgaaacactctttttgtggaatttgcaagtggagatttcaagcgatttgaggccaaaggcagaaaaggaaatatcttcgtataaaaactagacagaatcattctcagaaactgctctgcgatgtgtgcgttcaactctcagagtttaacttttcttttcattcagcattttggaaacactctgtttgtaaagtctgcacgtggatattttgaccacttagaggccttcgttggaaacgggtttttttcctgtaaggctaaaaagaagaattcccagtaacttccttctgttgtgtacattcaactcacagagttgaacgctcccttagacagagcagatttgaaacactctttttgggcaattggcaagtggagattacaagcgctttaaggtcaatggcagaaaaggaaatatcttcgtttcaaaactagacagaatgattctcagaaacttctttgtgatgtgtgcgttcaactcacagagtttaacctttcttttcatagaacagttaggaaacactctgtttgtaaacactgcaagtggatattcagacctctttgaggccttcgttggaaacgggatttcttcatactatgctagacagaagaattctcagtaacttccttgtgttgtgtgtattcaactcacagagttgaacgatcctttacacagagcagacttgaaacactctttttgtggaatttgcaactggagatttcagccgcgttgaggtcaatggtagaaaaggaaatatcttcgtataaaaactggacagaatgattctcagaaacttctttgtgatgtgtgcgttcaactcacagtgtttaacctttcttttcatagagcagttaggaaacactctgtttgtaaactctgcaagtggatattcagacctctttgaggccttcgttggaaacgggatttcttcatactgtgctagacagaagaattcccagtaacttccttgtgttgtgtgtgttcaactcacagagttgaactttcatttacacagagcagatttgaaacactctttttgtggaatttgcaagtggagatttcaagcgctttgaggtcaaaggcagaaaaggaaatatcttcgtttcaaaactagacagaatcattctctgaaactgctgcgtgatgtgttcgttcaactctcagagtttaacttttcttttcattcagcggtttggaaacactctgtttgtaagtctgcacgtggatattttgaccacttagacgccttcgttggaaacgggtttttttcatgtaaggctagacagaagaattcccagtaacttccttgtgttgtgtgcattcaactcacagagttgaacgttcccttagacagagcagatttgaaacactctatttgtgaaatttgcaagtgtagatttcaagcgctttaaggtcaatggcagaaaaggaaatatcttcgtttcaaaactagacagaatcattcccacaaactgcgttgttatgtgttcgttcaactcacagagtttaacctttctgttcatagagcagttaggaaacactctgtttgtaaagtctgtaagtggatattctgacatcttgtggccttcgttggaaaagggatttcttcatattctgctagacagaataattctcagtaacttccttgtgttgtgtgtattcaactcacagagttgaacgatcctttacagagagcagacttgaaacactctttttgtggaatttggaagtggagatttcagccgctttgaggtcaaaggtagaataggaaatatcttcctacagaaaatagacagaatgattctcagaaactcctttgtgatgtgtgtgttcaactcacagagtttaacctttcttttcatagagcagttagtaaacactctgtttataaagtctgcaagtggatattcagacccctttgaggccttcgttggaaacgggattgcttcatattatgctagacagaagaattctcagtaacttcccttgtgttgtgtgtattcaactgacagagttgaactttcatttagagagagcagatttgaaacactgtttttgtggaatttgcaaatggagatttcaagcgctttggggccaaaggcagaaaaggaaatatcttcgtataaaaactagacagaatcattctcagaaactgctctgcgatgtgtgcgttcaactctcagagtttaacttttcttttcattcaacagtttggaaacactctgtttgtaaagtctgcacgtggatattttgaccacttagaggccttcgttggaaacgggtttctttcctgtaaggctagacagaagaattcccagtaacttccttgtgttgtgtgcattcaactcacggagttgaacgttccctaagacagagcagatttgaaacactctatttgtgcaatttgcaagtgtagatttcaagcgctttaaggtcaacggcagaaaaggaaatatcttcgtttcaaaactagacagaatcattcccacaaactgcgttgtgatgtgttcgttcaactcacagagtttaacctttcttttcatagagcagttaggaaacactctgtttgtaaactctgcaagtggatattcagacctctttgaggccttcgatggaaacgggatttctccatactatgctagacagaagaattctcaataacttccttgtgttgtgtgtattcaactcacagagttgaacgatcctttacacagagcagacttgaaacactcttgttgtggaatttgcaggtggagatttcagcctctttgaggtcaatggtagaataggaaatatcttcctatagaaactagacagaatggttctcagaaactcctttgtgatgtgtgtgttgaactcacagagtttaacctttcttttcatagagcagttagtaaacactctgtttataaagtctgcaagtggatattcagacccctttgaggccttcgttggaaacgggatttcttcatattatgctagacagaagaattctcagtaacttccttgtgttgtgtgtattcaactgacagagttgaactttcatttagagagagcagatttgaaacactctttttgtggaatttgcaagtggagatttcaagtgctttggggccaaaggcagaaaaggaaatatcttcgtataaaaactagacagaatcattctcagaaactgctgcgtgatgtgtgcgttcaactctcagagtttaacttttcttttcattcagcagtttggaaacactctgtttgtaaagtctgcacgtggaaattttgaccacttagaggccttcgttggaaacgggtttttttcatgtaaggctagacagaagaattcccagtaacttccttgcgttgtgtacattcaactcacagagttgaacgttcccttagacagagcagatttgaaacactctttttgtgcaattggcaagtggagatttcaagcgctttaaggtcaatggcagaaaaggaaatatcttcgtttcaaaactagacagaatgattctcagaaactcctttatgatgtgtgcgtttaactcacagagtttaacctttcttttcattgagcagttaggaaacactctgtttgtaaagtctgcaagaggatattctgacctccttgaggccttcgttggaaacgggatttcttcatattctgctagacagaagaattctcagtgacttccttgtgttgtgtgtattcaactcacagatttgaacgatcctttacacagagcagacttgaaacactctttttgtggaatttgcaagtgcagatttcagccaatttgaggtcaatggtagaaaaggaaatatcttcgtataaagactagacagatgattctcagaaactcctttgtgatgtgtgcgttcaactcacagagtttaacccttctgttcatagagcagttaggaaacactctgtttgtaaagtctgcaagtggatattcagacctccttgaggccttcggtggaaaagggatttcttcatattctgctagacagaagaattctcagtaacttccttgtgttgtgtgtattcaactcacagagttgaacgatactttacacagagcagacttgaaacactcgttttgtggaatttgcaagtggagatttcagccgcgttgaggtcaatggtagaaaaggaaatatcttcgtataaaaactagacagaatcattctcagaaactgctctgcgatgtgtgcgttcaactctcagattttaacttttcttttcattcagcagtttggaaacactctgtttgtaaagtctgcacgtggatattttgaccacttagaggccttcgttggaaacgggtttttttcctgtaaggctaaacagaagaattctcagtaacttccttgtgttgtgtgtattcaactcacagatttgaacgatcctttacagagagcagacttgaaacactgtttttgtggaatttgcaagtggagatttcagccgctttgaggtcaatggtagaataggaaatatcttcctatagaaactagacagaatgattctcataaactcctttgtgatgtgtgcgttcaacacacagagtttaacctttctgttcatagagcagttaggaaacactctgtttgtaaagtctgtaagtggatattctgacatcttgtggccttcgttggaaacgggatttcttcatattctgctagacagaagaattctcagtaacttccttgtgttgtgtgtattcaactcactgagttgaacgatcctttacacagagcagacttgaaacactctttttgtggaatttgcaagtggagatttcagccgctttgaggtcaatggtagaaaaggaaatatcttcgtataaaaactagacagaatgattctcagaatctcctttgtgatgtgtgcgttcaactcacagagtttaacctttcttttcatagagcagttaggaaacactctgtttgtaaagtctgcaagtggatattcagtcctctttgaggccttcgttggaaacgggtttttttcatataaggctagacagaagaattcccagtaactttccttgtgatgtgtgtgttcaactcacagagttgaactttcatttacacagagcacatttgaaacactctttttgtggaatttgcaagtggagatttcaagcgctttgaggccaaaggcagaaaaggaaatatcttcgtataaaaactagacagaatcattctcagaaactgctctgcgatgtgtgcgttcaactctcagagtttaacttttcttttcattcagcagtgtggaaaaactctgtttgtaaagtctgcacgtggatattctgaccacttagaggccttcgttggaaacgggtttttttcctgtaaggctagacagaagaattctcagtaacttccttgtgttgtgtgtattcaactcacagagttgaactgatcctttacacagaacagtcttgaaacactctttttgtggaatttgcaattggagatttcagccgctttgaggtcaatggtagaataggaaatatcttcctatagaaactagacagaatgattctcagaaactcctttgtgatgtgtgcgttcaactcacagagtttaacctttcttttcatagagcagttaggaaacactctgtttgaaaagtctgcaagtggatattcagacctccttgaggccttcgttggaaacgggatttcttcatattatgctagacagaagaattctcagtaacttccttgtgttgtgtgtattcaactcacagagttgaacgatcctttccacagagcagacttgaaacactctttttgtggaatttgcaagtggagatttcagccgctttgaggtcaatggtagaaaaggaaatatcttcgtataaagactagacagagtgattctcagaaactcctttgtgatgtctgcgtttaactcacagagtttaaccattcttttcatagagcagttaggaaacactctgtttgtaaagtctgcaagtggatattcagacctccttgaggccttcgttggaaacgggatttcttcatattatgctagactgaagaattcccagtaacttccttgtgttgtgtgtgttcaactcacagagttgaactttcatttacacagagtagatttgaaacactctttttgtggaatttgcaagtggagatttcaagcgctttgaggctaaaggcagaaaaggaaatatcttcgtataaaaactagacagaatcattctcagaaactgctctgcgatgtgtgcgttcaactctcaagagtttaacttttcttttcattcagaagtttggaaacactctgtttgtaaagactgcacgtggatattttgaccacttagaggccttcgttggaaacgggtttttttcatgtaaggctagacagaagaattctcagtaacttcctcgtgttgtgtgtattcaactcacagagttgaacgatcctttacacagagcagacttgaaacactctttttgtggaatttgcaagtggagatttcagccgctttgatgtcaatggtacaaaaggaaatatcttcgtataaagactagacagaatgattttcagaaactcttttgtgatgtgtgcgttcaactcacagagtttaacctttctgttcatagagcagttaggaaacactctgtttgtaaagtctgcaagtggatattcagacctccttgagaccttcgttggaaacgggatttcttcatattctgctagacagaagaattctcagtaacttccttgtgttgtgtgtattcaactcacagagttgtacgatcctttacacagagcagacttgaaacactcttgttgtggaatttgcaagtggagatttcagccactttgaggtcaatgctagaaaaggaaatatcttcgtataaagactagacagaatgattctcagaaactcctttgtgatgtgtgggttcaactcacagagtttaacctttcttttcatagagcagttaggaaacactctgtttgtaaagtctgcaagtggatattcagacctctttgaggccttcgttggaaacgggtttttttcatataaggctagacagaagaattctcagtaacttccttgtgttgtgtgtattcaactgacagagttgaactttcatttagacagagcagatttgaagcactgtttttgtggaatttgcaagtggagatttcaagcgctttgaggccaaaggcagaaaacgaaatatcttcgtataaaaactagacagaatcattctcagaaactgctctgcgatgtgtgcgttcagctctcagagtttaacttttcttttcattcagcagtttggaaacactctgtttgtaaagtctgcacgtggatattttgaccacttagaggccttcgttggaaatgggtttttgtcatgtaaggctagacagaagaattcccagtaacttccttgtgttgtgtgtgttcaactcacagagttgaactttcatttacacagagcagatttgaaacactctttttgtggaatttgcaaatggagatttcacccgcgttgaggtcaatggtagaaaaggaaatatcttcgtttcaaaactagacagaatgattctcagaaactcctttgtgatgtgtgcgttcaactcacagagtttaacctttctgttcatagagcagttaggaaacactctgtttgtaaagtctgtaagtggatattctgacatcttgtggccttcgttggaaacgggatttcttcatattctgctagacagaagaattctcagtaacttccttgtgttgtgtgtattcaactcacagtgttgaacgatcctttacacagagcagacttgaaacactctttttgtggaatttgcaagtgtagatttcaagcgctttaaggtcaatggcagaaaaggaaatatcttcgtatcaaaactagacagaatgattctcataaactcctttgtgatgtgtgcgttcaactcacagagtttaacctttcttttcatagagcagttaggaaacactctgtttataaagtctgcaagtggatattcagacctccttgaggccttcgttggaaacgggatttcttcatattctgctagacagaagaattcccagtaacttccttgtgttgtgtgtgttcaactcgcagagttgaactttcatttacacagagcagatttgaaacactctttttgtggaatttgcaaatggagatttcaagcgctttgaggccaaaggcagaaaaggaaatatcttcgtataaaaactagacagaatcattctcagaaactgctctgcgatgtgtgtgttcaactctcacagtttaacttttcttttcattcagcagttaggaaacactctgtttgtaaagtctgcacgtggataatttgaccacttagaggccttcgttggaaacgggtttttttcatgtaaggctagacagaagaattcccagtaacttccttgtgttgtgtacattcaactcacagagttgaacgttcccttagacagagcagatttgaaacactctttttgtggaatttgcaagtggagatttcagccgctttgaggtcaatggtagaaaaggaaatatcttcgtataaaaactagacagaaatgattctcagaaaatcttttgtgatgtgtgcgttcaactcacagagtttaacttttcttctcatagagcaggtaggaaacactctgtttgtaaagtctgcaagtggatattcagacctctttgaggccttcgttggaaacgggatttcttcatattatgctagacagaataattctcagtaacttccttgtgctgtgtgtattcaactcacagagttgaaggatcctttacagagagcaggcttgaaacactctttttgtcgaatttgcaagtggagatttcagccgctttgaggtcaatggtagaataggaaatatcttcttatagaaactagacagaatgattctcataaactcctttgtgaagtgtgcgttcaactcacagagtttaacctttcttttcatagagcagttaggaaacactctgtttgtaaaggcggcaagtggatattcagacctccttgaggccttcgttggaaacaggatttcttcatattctgctagacagaagaattctcagtaacttccttgtgttgtgtgtattcaactgacagagttgaactttcatttagagagagcagatttgaaacactgtttttgtggaatttgcaagtggagatttcaagcgctttgtggccaaaggcagaaaaggaaatatcttcctataaaaactagacagaatcattctcagaaacagctctgcgatgtgtgcgttcaactctcagagtttaacttttcttttcattcagcagtttggaaacactctgtttgtaaagtctgcacgtggatattttgaccacttagaggccttcgttgcaaacgggtttttttcctgtaaggctagacagaagaattcccagtaacttccttgtgttgtgtgcattcaactcacagagttgaacgtccccttagacatagcagatttgaaacactctatttctgcaatttgcaagtgtagttttcaagctctttaaggtcaacggcagaaaaggaaatatcttcgtttcaaaactagacagaatcattcccacaaactgcgttgtgatgtgttcgttcaacttacagagtttaacctttctgttcatagagcagttaggaaacactctgtttgtaaagtctgaaagtggatattctgacatcttgtggccttcgttggaaacgggatttcttcatattctgctagacagaagaattctcagtaacttccttgtgttgtgtgtattcaactcacagagttgaatgatcctttacacagaacagtcttgaaacactctttttgtggaatttgcaagtggagatttctgccgctttgaggtcaatggtagaataggaaatatcttcctatagaaactagacagaatgattctcataaactcctttgtgatgtgtgcgttcaactcacaaagtttaacttttcttttcatagagcagttaggaaacactctgtttgtaaagtctgcaagtggatattcagaactctttgaggccttcgttggaaacgggatttcttcatattatgctagacagaagaattctcagtaacttccttgtgttgtgtgtattcaactgacagagttgaactttcatttagagagagcggatttgaaacactgtttttgtggaatttgcaagtggagatttcaagcgctttggggccaaaggcagaaaaggaaatatcttcgtataaaaactagacagaatcattctcagaaactgctgcgtgatgtgtgcgttcaactctcagagtttaacttttcttttcattcagcggtttggaaacactctgtttgtaaagtctgcacgtggaaattttgaccacttagaggccttcgtggaaacgggtttttttcatgtaaggctagacagaagaattcccagtaacttccttgtgttgtgtgcattcaactcacagagttgaacgttcccttagacagagcagatttgaaacactctatttgtgcaatttgcaagtgtagatttcaagcgctttaaggtcaatggcagaaaaggaaatatcgtcgtttcaaaattagacagaatcattcccacaaactgcgttgtgatgtgttcgttcaactcacagagtttaacctttctgttcatagagcagtgaggaaacactctgtttgtaaagtctgtaagtggatattctgacatcttgtggccttcgttggaaacgggatttcttcatattctgctagacagaagaattctcagtaacttctttgtgttgtgtgtattcaactcacagagttgaacgatcctttacacagagcagacttgaaacactctttttgtggaatttgcaagtggagatttcagccgctttgaggtcaatggtagaataggaaatatcttcatatagaaactagacagaatgtttctcagaaactcctttgtgatgtgtgcgttgaactcacagagtttaacctttcttttcatagagcagttaggaaacactctgtttgtaaagtctgcaagtggatattcagacatcgttgaggctttcgttggaaacgggatttcttcatattctgatagaaagaagaattctcagtaacttccttgtgttgtgtgtattcaactcacagagttgaatgatcctttacacagaacagtcttgaaacactctttttgtggaatttgcaagtggagatttcagccgctttgaggtcaatggtagaataggaaatatcttccaatagaaactagacagaatcattctcagaaactgctctgcgatgtgtgcgttcaactctcagagtttaacttttcttttcattcagcagtttggaaacactctgtttgtaaagtctgcacgtggatattttgaccacttagaggccttcgttggaaacggatttttttcctgtaaggctagacagaagaattcccagtaacttccttgcgttgtgtacattcaactcacagagttgaacgttcccttagacagagcagatttgaaacactctttttgtgcaattggcaagtggagatttcaagcgctttaaggtcaatggcagaaaaggaaatatcttcgtttcaaaactagacagaatcattcccacaaactgcgttgtgatgtgttcgttcaactcacagagtttaacttttcttttcatagagcagttaggaaacagtctgtttgtcaattctgtaagtggatattctgacatcttgtggccttcgttggaaacgggatttcttcatattctgctagacagaagaattctcagtaacttccttgtgttgtgtgtattcaactcacagagttgaatgatcctttacacagatcagtcttgaaacactctttttgtggaatttgcaagtggagatttcagccgctttgaggtcaatggtagaataggaaatatcttcctatagaaactagacagaatgattctcagaaactcctttgtgatgtgtgcgttcaactcacagagtttaacctttcttttcatagagcagttaggaaacacactgtttgtaaagtctgcaagtggatattcatacctctttgaggccttcgttgaaaacgggatttcttcatattctgctagagagaagaattctcagtaacttccttgtgttgtgtgtattcaactcacagagttgaacgatcctttacacagagcagacttgaaacactctttttgtggaatttgcaagtggagatttcaagcgctttgaggccaaaggcagaaaaggaaatatcttcgtacaaaaactagacagaatcatactcagaaactgctctgcaatgtgtgcgttcaactctcagagtttaacttttcttttcattcagcagtttggaaacactctgtttgtaaagtctgcacgtggatattttgaccacttagtggcctttgttggaaacggttttttttcctgtaaggctagacagaagaattcccagtaacttccttgtgttgtgtacattcaactcacagagttgaacgttcccttagacagagcagatttgaaacactctttttgtgcaattggcaaatggagatttcaagcgctttaaggtcaatggcagaaaaggaaatatcgtcgtttcaaaactagacagaatcattcccacaaactgcgttgtgatgtgttcgttcaactcacagagtttaacctttcttttcatagagcagttaggaaacagtctgtttgtcaattctgtaagtggatattctgacatcttgtggccttcgttggaaacgggatttcttcatattccgctagacagaagaattctcagtaacttccttgtgttgtgtgtattcaactcacagagttgaacgatcctttacacagagcagacttgaagcaccctttttgtggaatttgcaagtggagatttcagccgctttgaggtcaatggtagaaaaagaaatatcttcgtataaaaactagacagaatgattctcagaaactcctttgtgatgcgtgcgttcaactcacagagttcaacctttcttttcatagagcagttgggaaacactctgtttgtaaagtctgcaagtggatattcagacttctttgaggccttcgttggaagcgggatttcttcatattctgctagacagaagaattcccagtaacttccttgtgttgtgtgtgttcaactcacagagttgaactttcatttacacagagcagatttgaaacactctttttgtggaatttgcaagtggagattttaagggctttgaggccaaaggcagaaaaggaaatatcttcgtataaaaactagacagaatcattctcagaaactgctctgcgatgtgtgcgttcaactctcagagtttaactcttcttttcattcagctgtttggaaacactctgtttgtaaagtctgcacgtggataatttgactacttagaggccttcgttggaaacgggtttttttcctgtaaggctagacagaagaattcccagtaacttccttgtgttgtgtgcattcaactcacagagttgaacgttcccttagacagagcagattcgaaacactctatttgtgcaatttgcaagtgtagatttcaagcgctttaaggtcaatagcagaaaaggaaatatcttcgtttgaaaactagacagaatcattcccacaaactgcgttgtgatgtgtgcgttcaactcacagagtttaacttttcttttcatagagcagttaggaaacactctgtttgtaaagtctgcaagtggatattcagacctctttgaggccttcgttggaaacgggatttcttcatattctgctagacagaagaattctcagaaacttccttgtgttgtgtgtattcaactcacagagttgaacgatcctttacacagagcagacttgaaacactctttttgtggaaattgcaagtggagatttcaggcgctttgaggtcaatggtagaaaaggaaatatcttcgtataaaaactagacagaatgattctcagaaaatcttttgtgatgtgtgcgttcaactcacagagtttaacttttcttctcatggagcagttaggaaacactctgtttgtaaagtctgcaagtggatattcagacccctttgaggccttcgttggaaacgggatttcttcatattctgctagacagaagaattcccagtaacttccttgtgttgtgtgtattcaactcacagagttgaacgatcctttacacagagaggacttgaaacactctttttgaggaatttgcaagtggagatttcagccgctttgaggtcaatggtagaaaaggaaatatcttcgtataaaaactagacagaatgattctcagaaacttctttgtgatgtgtgcgttcaactcacagagtttaacctttcttttcatagagcagttaggaaacactctgtttgttaagtctgcacgtggatacttggacttctttgaggccttcgttggaaacgggtttttttcatgtaaggctggacagaagaattcccagtaacttccttgtgttgtgtacattcaactcacagagttgaacgttcccttagacagagcagatttgaaacactctttttgtgcaattggcaaaaggagatttcaagcgctttacgttcaatggcagaaaaggaaatatcttcgtttcaaaactagacagaatcattcccacaaactgcgttgtgatgtgttcgttcaactcacagagtttaacctttcttttcatagagcagttaggaaacagtctgtttgtaaattctgtaagtggatattctgacatcatgtggccttcgttggaaacgggatttcttcatattctgctagacagaagaattctcagaaacttcgttgtgttgtgtgttttcaactcacagagttcaacgatcctttacacagagcagacttgaaacactctttttgtggaatttgcaagtggagatttcagccattttgaggtcaacgttagaaaaggaaatatcttcgtataaaaactacacagaatgattctcagaaactcctttgtgatgtgtgcgttcaactcacagagttcaacctttcttttcatagagcagttgggaaacactctgtttgtaaagtctgcaagtggatattcagacttctttgaggccttcgttggaaacgggatttcttcatattctgctagacagaagaattcccagtaacttccttgtgttgtgtgtgttcaactcacagagttgaactttcatttacacagagcagatttgaaacactctttttgtggaatttgcaagtggagatttcaagcgctttgaggccaaaggcagaaaaggaaatatcttcgtatcaaaactagacagaatcattctcagaaactgctctgcgatgtgtgcgttcaactctcagaagtttaacttttcttttcattcagcagtttggaaacactctgtttgtaaagtctgcacgtggataacttgaccacttagaggccttcgttggaaacgggtttttttcatgtaaggctagacagaagttttcccagtaacttccttgtgttgtgtacattcaactcacagagttgaacgttcccttagacagagcagatttgaaacactctttttgtgcaattggcaaatggagatttcaagcgctttaaggtcaatggcagaaaaggaaatatcttcgtttcaaaactagacagaatcattcccacaaactgcgttctgatgtgttcgttcaactcacagagtttaacctttctgttcatagagcagttaggaaacactctgtttgtaaagtctgtaagtggatattctgacatcttgtggccttcgttggaaacgggatttcttcatattctgctagacagaagaattctcagtaacttccttgtgttgtgtgtattcaactcacagagttgaacgatcgtttacacagagcagacttgaaacattctttttctggaatttgcaagtggagatttcagccgctttgaggtcaatggtagaataggaaatatcttcctatagaaactagacagaaatgattctcagaaactcctttgtgatgtgtgcgttcaactcacagagtttaacctttcttttcatagagcagttaggaaacactctgtttgtaaagtctccaagtggatattcagacctctttgaggccttcgttggaaacgggtttttttcatataaggctagacagaagaattctcagtaacttccttgtgttgtgtgtattcaactgacagagttgaacgatcctttacacagagcagacttgaaacactctttttgtggaatttgcaaggggagatttcaagcgctttggggccaaaggcagaaaaggaaatatcttcgtataaaaactagacagaatcattctcagaaactgctctgcgatgtgtgcgttcaactctcagagtttaaattttcttttcattcagcagtttggaaacactctgtttgtaaagtctgcacgtggatattttgaccacttagaagccttcgttggaaacgggtttctttcctgtaaggctagacagaagaattcccagtaacttccttgtgttgtgtacattcaactcacagagttgaacgttcccttagacagagcagatttgaaacactctttttgtgcaattggcaaatggagatttcaagcgctttaagttcaatggcagaaaaggaaatatcttcgtttcaaaactagacagaatcattcccacaaactgcgttgtgatgtgttcgttcaactcacagagtttaacctttctgttcatagagcagttaggaaacactctgtttgtaaagtctgtaagtggatattctgacatcttgtggccttcgttggaaacgggatttcttcatattatgctagacagaagaattctcagtaacttccttgtgttgtgtgtattcaactcacagagttgaacgatcctttacacagagcagacttgaaacactctttttgtggaattggcaagtggagatttcagccgctttgaggtcaatggtagaataggaaatatcttcctatagaaactagacagaatgattctcagaaactcctttgtgatgtgtgcgttcaactcacagagtttaacctttcttttcatagagcagttaggaaacactctgtttgtaaagtctgcaagtggatattcagacttctttgaggccttcgttggaaacgggtttttttcatataaggctagacagaagaattcccagtaacttccttgagttgtgtgtattcaactcacagagttgaactttcatttacacagagcagatttgaaacactctttttgtggaatttgcaaatggagatttcaagtcctttcaggccaaaggcagaaaaggaaatatcttcgtatgaaaactagacagaatcattctcagaaactgctctgcgatgtgtgcgttcaactctccgagtttaacttttcttttcattcagcagtttggaaacactctgtttgtaaagtctgcacgtggataatttgaccacttagaggccttcgttggaaacggtttttttttcatgtaaggctagacagaagaattcacagtaacttccttgtgttgtgtacattcaactcacagagttgaacgttcccttagacagagcagatttgaaacactctttttgtgcaattggcaagtggagatttcaagcgctttaaggtcaatggcagaaaaggaaatatcttcctttcaaaactagacagaatcattcccacaaactgcgttgtgatgtgttcgttcaactcacagagtttaacctttcttttcatagagcagttaggaaacagtctgtttgtaaattctgtaagtggatattctgacatcttgtggccttcgttggaaatgggatttcttcatattctgctagacagaagaattctcagaaacttccttgtgttgtgtgtcttcaactcacagagttgaacgatgctttacacagagtagacttgaaacactctttttgtggaatttgcaagtggagatttcaggcgctttgaggtcaatggtagaaaaggaaatatcttcgtataaaaactagacagaatgattctcataaactcctttgtgatgtgtgcgttcaactcacagagtttaacttttcttttcatagagcagttaggaaacactctgtttgtaaagtctgcaagtggatattcagacctctttgaggccttctttggaaacgggatttcttcatattatgctagacagaagaattctcagtaacttccttgtgttgtgtgtattcaactcacagagttgaatgatcctttacacagaggagacttgaaacactctttttgtggaatttgcaagtggagatttcagccgctttgaggtcaatagtagaaaaggaaatatcttcgtagaaaaactagacagaatgattctcagaaactcctttgtgatgtgtgtgttcaactcacagagtttaacctttcttttcatagagcagttaggaaacactctgcttgtaaagtctgcaagtggatattcagacctcgttgaggccttcgttggaaacgggatttcttcatattctgctagacagaagaattctcagtaacttccttgtgttgtgtttatgcaactcacagagttgaatgatcctttacacagagcagacttgaaacactctttttgtggaatttgcaagtggagatttcagccgctttgtggtcaatggtagaaaaggaaatatcttcgtataaagactagacagaatcattctcagaaactgctctgcgatgtgtgcgttcaactctcagtgtttaacttttcttttcattcagcagtttggaaacactctgtttgtaaagtctgcacgtggataatttgaccacttagagattttcgttggaaacgggtttttttcatgtaaggctagacagaagaattcccagtaacttccttgtgttgtgtacattcaactcacagagttgaacgttcccttagacagagcagatttgaaacactctttttgggcaattggcaagtggagattacaagcgctttaaggtcaatggcagaaaaggaaatatcttcgtttcaaaactagacagaatcattcccacaaactgcgttgtgatgtgttcgttcaactcacagagtttaacctttcttttcatagagcagttaggaaacactctgttggtaaattctgtaagtggatattctgacatcttgtggccttcgttggaaacgggatttctaaatattctgctagacagaagaattctcagtaacttccttgtgttgtgtttattcaacgcacagagttgaatgatcctttacgcagagcagacttgaaacactctttttgtggaatttgcaagtggagatttcagccgctttgaggtcaatggtagaaaagtaaatatcttcgtataaagactagacagaatgattctcagaaaatcttttgtgatgtgtgcgttcaactcacagagtttaacttttcttctcatagagcagttaggaaacactctgtttgtaaagtctgcaagtggatattcagacctctttgaggccttcgttggaaacgggatttcttcatattctgctagacagaagaattctcactaacttccttatgttgtgtgtattcaactcacagagttgaaggatgctttacagagagcaggcttgaaacactctttttgtcggatttgcaagtggagatttcagccgctttgaggtgaatggtagaataggaaatatcttcttatagaaactagacagaatcattctcagaaactcctttgagatgtgtgcgttcaactctcagagtttaacttttcttttcattcagcagtttggaaacactctgtttgtaaagtctgcacgtggatattttgaccacttagaggccttcgttggaaacgggtttctttcctgtaaggctagacagaagaattcccagtaacttccttgtgttgtgtgcattcaactcacagagttgaacgttcccttagacagagcagatttgaaacactctatttgtccaatttgcaagtgtagatttcaagcgctttaaggtcaacggcagaaaaggaaatatcttcgtttcaaaactagacagaatcattcccacaaactgcgttgtgatgtgttcgttcaactcacagagtttaacctttcttttcatagagcacttaggaaacagtctgtttgtaaattctgtaagtggatattctgacatcttgtggccttcgttggaaacgggatttcttcatattctgctagacagaagaattctcagtaacttccttgtgttgtgtgtattcaactcacagagttgaacgatcctttacacagagcagacttgtaacactctttttctggaatttgcaagtggagatttcagccgctttgaagtcaaaggtagaaaaggaaatatcttcctataaaaactagacagaatgattctcagaaacttctttgtgatgtgtgcgttcaactcacagagtttaacctttctattcatagagcagttaggaaacactctgtttgtaaactctgcaagtggatattcagacctctttgaggccttcgatggaaacgggatttctccatactatgctagacagaagaattctcagtaatttccttgtgttgtgtgtattcaactcacagagttgaacgatcctttacacagagcagacttgaaacactctttttgtggaatttgcaagtggagatttcagccgctttgaggtcaatggtagaaaaggaaatatcttcgtataaaaactagacagaatcattctcagaaactgctctgggatgtgtgcgttcaactctcagagtttaacttttcttttcattcagcagtgtggaaacactctgtttgtaaagtctgcacgtggatattttgaccacttagaggccttcgttggaaacgggtttttttcctgtaaggctagacagaagaattcccagtaacttccttgtgttgtgtacattcaactcacagagttgaacgttaccttagacagagcagatttgaaacactctttttgtgcaattggcaaatggagatttcaagcgctttaaggtcaatggcagaaaaggaaatatcttcgtttcaaaactagacagaatcattcccacaaactgcgttgtgatgtgttcgttcaactcacagagtttaacctttctgttcatagagcagttaggaaacactctgtttgtaaagtctgtaagtggatattctgacatcttgtggccttcgttggaaacgggatttcttcgtattctgctagacagaagaattctcagtaaattccttgtgttgtgtgtattcaactcacagagttgaacgatcctttacacagagcggacttgaaacacactttttgtggaatttgcaagtggagatttcagccgcgttgaggtcaatggtagaaaaggaaatatcttcgtataaaaactagacagaatgattctcagaaactcctttgtgatgtgtgcgtgcaactcacagagtttaacttttcttttcatagagcagttaggaaacactctgtttgtaaagtctgcaagtggatattcagacctctttgaggccttcgttggaaacgggatttcttcatattatgctagacagaagaattcccagtaacttccttgtgttgtgtgtgttcaactcacagagctgaactttcatttacacagagcagatttgaaacactctttttgtggaatttgcaaatggagatttcaagcgctttgaggccaaaggcagaaaaggaaatatcttcgtttcaaaactagacggaatcattctcagaaactgctctgcgatgtgtgcgttcaactctcagagtttaacttctcttttcattcagtagtttggaaacactctgtttgtaaagtctgcacgtggataacttgaccacttagaggccttcgttggaaacgggtttttttcatgtaaggctagacagaagaattcccagtaacttccttgtgttgtgtacattcaactcacagagttgaacgttcccttagacagagcagatttgaaaaactctttttgtgcaattggcaagtggagatttcaagcgctttaaggtcaatggcagaaaaggaaatatcttcgtttcaaaactagacagaatcattcccacaaactgcgttgtgatgtgttcgttcaactcacagagtttaacctttcttttcatagagcagttaggaaatagtctgtttgtaaattctgtaagtggatattctgacatcttgtggccttcgttggaaacgggatttcttcatattctgctagacagaagaattctcagtaacttccttgtgttgtgtgtattcaactcacagggttgaacgatcctttatacagagcagacttgaaacactctttttgtgggacttgcaagtggagatttcagccgctttgaggtcaataatagtaaaggaaatatcttcgtagaaaaactagacagaatgattctcagaaactcctttgtgatgtgtgcgttcaactcacagagtttaacctttcttttcatagagcagttaggaaacactctgtttgtaaagtctgcaagtggatattcagacctccttgaggccttcgttggaaatgggatttcttcatattatgctagacagaagaattctcagtaacttccttgtgttgtgtgtattcaactcacagagttgaacgatcctttacacagagcatacttgaaacactcttgttgtggagtttgcaagtggagatttcagccgctttgaggtcaatggtagaataggaaacatcttcctatagaaactagacagaatcattctcagaaactgctctgcgatgtgtgcgttcaactctcagagtttaacttttcttttcattcagcagtttggaaacactctctttgtaaagtctgcacgtggatattttgaccatttagaggccttcgttggaaacgggtttttttcctgtaaggctagagagaagaattcccagtaacttccttgcgttgtgtacattcaactcacagagttgaacgttcccttagacagagcagatttgaaacactctttttgtgcaattggcaagtggagatttcaagcgctttaaggtcaatggcagaaaaggaaatatcttcgtttcaaaactagacagaatcattcccacaaactgcgttgtgatgtgttcgttcaactcacagagtttaacctttcttttcatagagcagttaggaaacagtctgtttgaaaattctgtaagtggatattctgacatcttgtggccttcattggaaacgggatttcttcatattctgctagacagaagaattctcagtaacttccttgtgttgtgtgtattcaactcacagaattgaacgatcctttacacagagcagacttgaaacattctttttgtggaatttgcaagtggagatttcagccgctttgaggtcaatggtagaataggaaatatcttcctatagaaaatagacagaatgattctcagaaaatcttttgtgatgtgtgcgttcaactcacagagtttaacttttcttctcatagagcagttaggaaacactctgtttgtatagtctgcaagtggatattcagacctctttgaggccttcgttggaaacgggatttcttcatattatgctagacagaagaattctcggtaacttccttgtgttgtgtgtattcaactgacagagttgaactttcatttagagagagcagatttgaaacactgtttttgtggaatatgcaagtggagatttcaagcgctttggggccaagggcagaaaaggaaatatcttcgtttaaaaactagacagaatcattctcagaaactgctgcgtgatgtgtgcgttcaacgctcagagtttaactattcttttcattcagcggtttggaaacactctgtttgtaaagtctgcacgtggatattttgaccacttagacgccttcgttggaaacgggtttttttcatgtaaggctagacagaagaattcccagtaacttccttgtgttgtgtacattcaactcacagagttgaacgttcccttagacagagcagatttgaaacactctttttgtgcaattggcaagtggagatttcaagcgatttaaggtcaatggcagaaaaggaaatatcttcgtttcaaaactagacagaatcattcccacaaactgcgttgtgatgtgttcgttcaactcacagagtttaacctttctgttcatagagcagttaggaaacactctgtttgaaaagtctgcaagtggatattcagacctccttgaggccttcgttggaaacgggatttcttcatattctgctagaccgaagaattctcagaatcttccttgtgttgtgtgtattcaactcacacagttgaacgatggtttacacagagcagatttgaaacactctttttgtggaatttgcaagtggagatttcagccgcgttgaggtcaatggtagaaaaggaaatatcttcgtataaaaactagacacaacgattctcagaaacttctttgtgatgtgtgcgttcaactcacagagtttaacctttcttttcatagagcagttaggaaacactctgtttgtaaactctgcaagtggatattcagacctgtttgaggccttcgttggaaacgggatttcttcatactatgctagacagaagaattcccagtaacttccttgtgttgtgtgtgttcaactcacagagttcaactttcatttacacagagcagatttgaaacactctttttgtggaatttgcaagtggagatttcaagcgctttgaggccaaaggcagaaaaggaaataccttcgtataaaaactagacagaatcattctcagaaactgctctgcgatgtgtgcgttcaactctcagaagtttaacttttcttttcattcagcagtttggaaacactctgtttgtaaagtctgcacgtggataacttgaccacttagaggccttcgttggaaacgggtttttttcctgtaaggctagacagaagaattcccagtaacttccttgtgttgtgtacattcaactcacagagttgaacgttcccttagacagagcagatttgaaacactctttttgtgcaattggcaagtggagatttcaagcgctttgaggtcaatggcagaaaaggaaatatcttcgtttcaaaactagacagaatcattcccacaaactgcgttgtgatgtgttcgttcatctcacagagtttaacctttcttttcgtagagcagttaggaaacagtctgtttgtaaattctgtaagtggatattctgacatcttgtggccttcgttggaaatgggatttcttcatattctgctagacagaagaattctcagaatcttccttgtgttgtgtgtattcaactcacagagttgaacgatggattacacagagcagatttgaaacactctttttgtggaatttgcaagtggagatttcagccgctttgaggtcaatggtagaaaaggaaatatcttcgtataaaaactagacagaatgattctcagaaactcctttgtgatgtgtgcgttcaactcacagagtttaacctttcttttcatagagcagttaggaaacactgtgtttttatagtctgcaagtggatattcagacatctttgaggccttcgttggaaacgggatttcttcatattctgctatacagaagaattctcagaaacttcctagtgttgtgtgttttcaactcacagagttgaacgatgctttacacagagtagacttgaaacactctttttgtgtaatttgcaagtggagatttcagccgctttgaggtcaatggtagaaaaggaaatatcttcgtataaaaactagacagaatgattgtcagaaactcctttgtgatgtgtgcgttcaactcacagagtttaacctttcttttcatagagcagttaggaaacactctgtttgtaaagtctgcaagtggatattcagacatctttgaggctttcgttggaaacgggatttcttcatattctgctatacagaagaattcccagtaacttccttgtgttgtgtgtgttcaactcacagagttgaactttcatttacacagagcagatttgaaacactctttttgtggaatttgcaagtggagatttcaagcgctttgaggtcaatggcagaaaaggaaatatcttcgtttcaatctagacagaatcattcccacaaactgcgttgtgatgtgttcgttcaactcacagagttttacctttctgttcatagagcagttaggaaacactctgtttgtaaagtctgtaagtggatattctgacatcttgtggccttcgttggaaaagggatttcttcatattctgctagacagaagatttctcagtaacttccttgtgttgtgtgtattcaactcacagagttgaacgatcctttacacagagcagacttggaacactctttttgtggaatttccaagtggagatttcagccgcgttgaggtcaatggtagaaaaggtaatatcttcgtataaaaactagacagaatgattctcagaaactcctttgtgatgtgtgtgttcacctcacagagtttaacctttcttttcatagagcagttagtaaacactctgtttataaagtctgcaagtggatattcagacccctttggggccttcgttggaaacgggatttcttcatattatgctagacagaagaattcccagtaacttccttgtgttgtgtgtgttcaactcacagagttgaactttcatttacacagagcagatttgaaacactctttttgtggaatttgcaagtggagatttcaagcgctttgaggccaaagcagaaaaggaaatatcttcgtttcaaaactagacagaatcattctcagaaactgctctgcgatgtgtgcgttcaactctcagagtttaacttttcttttcattcagcagtttggaaacactctctttgtaaagtctgcacgtggatattttgaccacttagaggccttcgttggaaacgggtttttttcctgtaaggctagacagaagaattcccagtaacttccttgtgttgtgtacattcaactcacagagttgaacgttcccttagacagagcagatttgaaacactctttttgtgcaattggcaagtggtgatttcagccgctttgaggtcaatggtataaaaggaaatatcttcgtataaaaactagacagaatgattctcagaaacttcattgtgatgtgtgcgttcaactcacagagtttaacctttcttttcatagagcagtttggaaacagtctgtttgtaaattctgtaagtggatattctgacatcttgtggccttcgttggaaacgggatttcttcatattctgctagacagaagaattctcagtaacttccttgtgttgtgtgtattcaactcacagagttgaacgatcctttacacagagcagacttgaaacactctttttgtggaatttgcaagtggagatttcagccgctttgaggtcaatagtagaaaaggaaatatcttcgtagaaacactagacagaatgattctcagaaacttctttgtgatgtgtgcgttcaactcacagagtttaacctttcttttcatagagcagttaggaaacactctgtttgtaaagtctgcaagtggatattcagacctctttgaggccttcgttggaaacgggatttcttcatactatgctagtcagaagaattctcagtaacttccttgtgttgtgtgtattcaactcacagagttgaactttcatttacacagagcagatttgaaactctctttttgtggaagttgcaagtggagatttcaagcgctttgaggccaaaggcagaaaaggaaatatcttcgtttcaaaactagacagaatcattctcagaaactgctgcgtgatgtgtgcgttcaactctcagagtttaacttttcttttcattcagcggtttggaaacactctgtttgtaaagtctgcacatggatattttgaccacttagaggccttcgttggaaacgggttttcttcatgtaaggctagacagaagaattcccagtaacttccttgtgttgtgcgcattcaactcacagagttgaacgttcccttagacagagcagatttgaaacactctatttgtgcaatttccaagtgtagatttcaagcgctttaaggtcaacggcagaaaaggaaatatcttcgtttcaaaactagacagaatcattcccacaaactgcgttgtgatgtgttcgtacaactcacagaagtttaacctttctgttcatagagcagttaggaaacactctgtttgtaaagtctgtaagtggatattcagacatcttgtggccttcgttggaaacgggatttcttcatattctgctagacagaagaattctcagtaacttccttgtgttgtgtgtattcaactcacagagttgaacgatcctttacacagagcagacttgaaacactctttttgtggaatttgcaagtggagatatcagccgctttgaggtcaatggtagaaaaggaaatatcttcgtataaaaactagacagagaatgattctcagaaactcctttgtgatgtgtgcgttcagctcacagagtttaacctttctttttatagagcagttcggaaacactctgtttgtaaagtctgcaagtggatattcagacctctttgaggccttcgttggaaacgggatttcttcatattctgctagacagaataattctcagtaacttccttgtgttgtgtgtattcaactcacagagttgaaggatcctttagagagagcaggcttgaaacactctttttgtcgaatttgcaagtggagatttcagccactttgaggtcaatggtagaataggaaatatcttcttatagaacctagacaaaatgattctcagaaacttctttgtgatgtgtgcgttcaactcacagtagttaaaactttcttttcatagagcagttaggaaacactctgtttgtaaagactgcacgtggatattcagacctctttgaggccttcgttggaaacgggtttttttcctgtaaggctagacagaagaattcccagtaactttccttgtgttgtgtacattcaactcacagagttgaacgttcccttagacagagcagatttgaaacactctttttgtgcaattggcaaatggagatttcaagcgctttaaggtcaatggcagaaaaggaaatatcttcgtttccaaactagacagaatcattcccacaaactgcgttgtgatgtgttcgttcaactcacagagtttaacctttctgttcatagagcagttaggaaacactctgtttgtaaagtctgaaagtggatattctgacatcttgtggccttcgttggaaacgggatttcttcatattctgctagacaaaagaattctcagtaactttccttgtgttgtgtgtattcaactcacagagttgaccgatcctttacacagagcagacttgtaacactctttttgtggaatttgcaagtggagatttcagccgctttgaagtcaaaggtagaaaagggaatatcttcctataaaaactagacagaatgattctcagaaactcctttgtgatgtgtgcgttcaacacacagagtttaacctttcttttcatagagcagttaggaaacactctgtttgtaaagtctgcaagtggatattcagacctctttgaggctttcgttggaaacgggatttcttcatattctgctagacagaagaattcccagtaacttccttgtgttgtgtgtgttcaactcacagagttgaactttcatttacacagagcagatttgaaacactctttttgtggaatttgcaagtggagatttcaagggctttgaggccaaaggcagaaaaggaaatgtcttcgtttcaaaactagacagaatgattctcagaaactggtttgtgatgtgtgcgttcaactcacagagtttaacctttcttttcatagagcagttaggaaacactctgtttgtaaagtctgcatgtggatatttggacttctctgaggtcttcgttggaaacgggtttttttcatgtaaggctagacagaagaattctcagtaacttccttgtgttgtgtgtattcaactcacagagttgaacgatcctttacacagagcagacttgaaacactctttttatggaatttgcaagtttagatttcagccgctttgaggtcaatggtagaaaaggaaatatcttcgtataaaaactagacagaatgattctcagaaactcctttgtgatgtgtgcattcaactcacagagtttaacctttcttttcatagagcagttaggaaacactctgtttgtaaagtctgcaattggatattcagacctccttgaggccttcgttggaaaagggatttcttcatattatgctagacagaagaattctcagtaacttccttgtgttgtgtgtattcaactcacagagttgaacgatcctttacacagagcagacttgaaacactctttttgtggaatttgcaagtggagatttcagccgctttgaggtcaatggtagaataagaaatatcttcctatagaaactagacagaaatgattctcagaaactcctttgtgatgtgtgcgttctactcacagagtttaacctttcttttcatagagcagttaggaaacactctgtttgtaaagtctgcaagtggatattcagacatctttgagactttcgttggaaacgggatttcatcatattctgctagacagaagaattctcagtaacttccttgtgttgtgtgtattcaactcacagagttggacgatcctttacacagagcagacttgaaacactctttttgtggcatttgcaagtggagatttcagccgctttgagttcaatggtagaataggaaatatcttcctatagaaactagacagaatcattctcagaaactgctctgcgatgtgtgcgttcaactctcagagtttaacttttcttttcattcagcagtttggaaacactctgtttgtaatgtctgcacgtggatattttgaccacttagaggccgtcgttgcaaacgggtttttttcctgtaaggctagacagaagaattcccagtaacttccttgtgttgtgtacattcaactcacagagttgaacgttcccttagacagagcagatttgaaacactctttttgtgcaattggcaagtggagatttcaagcgctttgaggtcaatggcagaaaaggaaatatcttcctttcaaaactagacagaaatcattcccacaaactgcgttgtgatgtgttcgttcaactcacagaagtttaacctttcttttcatagagcagttaggaaacagtctgtttgtaaattctgtaagtggatattctgacatcttgtggccttcgttggaaacgggatttcttcatattctgctagacagaagaattctcagtaacttccttgtgttgtgtgtattcaactcacagagttgaacgatcctttacacagaacagacttgtaacactctttttgtggaatttgcaagtggagatttcagccactttgaagtcaaaggtagaaaaggaattaacttcctataaaaactagacagaatgattctcagaaacttctttgtgatgtgtgtgttcaactcacagagtttaacctttcttttcatagagcagttaggaaacactctgtttgtaaactctgcaagtggatattcagacctctatgaggccttcgttggaaacgggtttttttcatataaggctagacagaaggattcccagtaacttccttgtgttgtgtgtgttcaactcacagagttgaactttcatttacaaagagcatatttgaaacactctttttgtggaatttgcaagtggagatttcaagcgctttgaggccaaaggcagaaaaggaaatatcttcgtataaaaactagacagaatcattctcagaaactgctctgcgatgtgtgcgttcaactctcagagtttaacttttcttttcattcagcagtttggaaacactctgtttgtaaagtctgcacgtggataatttgaccacttagaggccttccttggaaacgggtttttttcatgtaaggctagacagaagaattcccaggaacttccttgtgttgcgtacattcaactcacacatttgaacgttcccttagacagagtagatttgaaacactctttttgtgcaattggcaagtggtgatttcagccgctttgaggtcaatggtagaaaaggaaatatcttcgtataaaaactagacagaatcattcccacaaactgcgttgtgacgtgttcgttcaactcacagagtttaacctttcttttcatagagcagttaggaaacagtctgtttgtaaattctgtaagaggatattctgacatcttgtggccttcgttggaaacgggatttcttcatattctgctagacagaagaattctcagtaacttccttgtgttgtgtgtattcaactcacagagttgaacgatcctttacacagagcggacttgaaacacacgttttgtggaatttgcaagtggagatttcagccgcgttgaggtcaatggtagaaaaggaaatatcttcgtataaaagctagacagaatgattctcagaaactcctttgtgatgtgtgcgttcaactaacagagtttaacctttcttttcatagagcagttaggaaacactctgtttgtgaagtctgcaagtggatattcagacctctttgaggccttcgttggaaacgggtttttttcatataaggctagacagaagaattcccagtaacttccttgtgttgtgtgtgttcaactcacagagttgaactttcatttacccagagcagatttgaaacactctttttgtggaatttgcaagtggagaattcaagcgctttgaggccaaaggcagaaaaggaaatatcttcgtataaaaactagacagaatcattctcagaaactgctctgcgatgtgtgcgttcaactctcagagtttaacttttcttttcattcagcagtttggaaacactctgtttgtaaagtctgcacgtggataatttgaccacgtagaggccttcgatggaaacgggtttttttcatgtaaggctagacagaagaattctcattaacttccttgtgttgtgtgtattcaactcacacagttgaacgatcctttacacagagtagacttgtaacactctttttgtggaatttgcaagtggagatttcagccgctttgaagtcaaaggtagaaaaggaaatatcttcctataaaaactagacagaatgattctcagaaacttcattgtgatgtgtgcgttcaactcacagagtttaacctttcttttcatagagcagttaggaaacactctgtttgtaaactctgcaagtggatattcagacctctttgaggccttcgttggaaacggggtttcttcatactgtgctagacagaagaattctcagtaacttccttgtgttgtgtgtattcaactcacagagttgaacgatcctttacacagagcggagttgaaacactctttttgtggaatttgcaagtggagatttcagccgcgttgaggtcaatggtagaaaaggaaatatcttcgtataaaaactagacagaatgattctcagaaacttcattgtgatgtgtgcgttcaactcacagagtttaacctttcttttcatagagcagttaggaaacactctgtttgtaaactctgcaagtggatattcagacctctttgaggccttcgttggaaacgggatttcttcatactatgctagacagaagaattctcagtaacttccttgtgttgtgtgtattcaactcacagagttgaacgatcctttacacagagcggacttgaaacactcgttttgtggaatttgcaagtggagatttcagccgcgttgaggtcaatggtagaaaagggaatatcttcgtataaaaactagcacagaatgattctcagaaacttctttgtgatgtgtgcgttcaactcacagagtttaacctttcttttcatagatcagttaggaaacactctgtttgtaaactctgcaagtggatattcaaacctctttgaggccttcgttggaaacgggatttcttcatactatgctagacagaagaattcccagtaacttccttgtgttgtgtgcattcaactcacagagttgaacgttcccttagacagagcagatttgaaacactctatttgtgcaatttgcaagtgtagttttcaagctctttaaggtcaacggcagaaaaggaaatatcttcgtttcaaaactagacagaatcattctcagaaactgctctgcgatgtgtgcgttcaactctcagagtttaacttttcttttcattcagcagtttggaaacactctgtttgtgaagtctgcacgtggataacttgaccacttagaggccttcgttggaaacgggtttttttcatgtaaggctagacagaagtattctcagtaacttccttgtgttgtgtgtattcaactcacagagttgaacgatcctttacacagagcggacttgtaacactctttttgtggaatttgcaagtggagatttcagccgctttgaagtcaaagttagaaaaggaaataacttcctataaaaactagacagaacgattctcagaaactcctttgtgatgtgtgcattcaactcacagagtttaacctttcttttcatagagcagttaggaaacactctgtttgtaaagtgtgcaagtggatattcagacctctttgaggccttcgttggaaacgggatttcttcatattctgctagacagaagaattcccagtaacttccttgtgttgtgtgtgttcaactcacagagttgaactttcatttacacagagcagatttgaaaccctctttttgtggaatttgcaagtggagatttcaagggctttgtggccaaaggcagaaaaggaaatgtcttcgtttcaaaactagacagaatcattctcagaaactgcggcgtgatgtgtgcgttcaactctcagagtttaacttttcttttcattcagcggtttggaaacactctgtttgtaaagactgcacgtggatattttgaccacttagaggccttcgttggaaacgggtttttttcatgtaaggctagacagaagaattcccagtaacttccttgtgttgtgtacattcaactcacagcagttgaacgttcccttagacagagcagatttgaaacactctttttgtgcaattggcaaatggagatttcaagcgctttaaggtcaatggcaggaaaggaaatatcttcgtttcaaaactagacagaatcattcccaaaaactgcgttgtgatgtgttcgttaatctcacagagtttaacctttcttttcatagagcagttaggaaacagtctgtttgtaaattctgtaagtggatattctgacatcttgtggccttcgttggaaacgggatttcttcatattctgctagacagaataattctcagtaacttccttgtgttgtgtgtattcaactcacagagttgaaggatcctttacagagagcaggcttgaaacactctttttgtcgaatttgcaagtggagatttcagccgctttgaggtcaatggtagaatagaaaatatcttcttatagaaactagacagactgattctcagaaactcctttgtgatgtgtgcgttcaactcacagagtttaacctttcttttcatagagcagttaggaaacactctgtttgtaaagtctgcaagtggatattctgacctctttgaggccttcgttggaaacgggattttttcatataaggctagacagaagaattctcagtaacttccttgtgttgtgtgtattcaactgacagagttgaactttcatttcgagagagcagatttgaaacactgtttttgtggaatttgcaagtggagatttcaagcgcattggggccaaaggcagaaaaggaaatatcttcgtataaaaactagacagaatcattctcagaaactgctgcgtgatgtgtgcgttcaactctcagagtttaacttttcttttcattcagcggtttggaaacactctgtttgtaaagtctgcacgttgatattttgaccacttagaggccttcgttggaaacgggtttttttcatgtaaggctagacagaagatttctcagtaacttccttctgttgtgtttattcaactcacagagttgaatgatcctttacacagagcagacttgaaacactctttttgtggaatttgcagttggagatttcagccgctttgaggtcaatggtagaaaagtaaatatcttcgtataaagactagacagaatgattctcagaaactcctttgtgatgtgtgcgttcaactcacagagtttaacctttccgttcatagagcagttaggaaacactctgtttgtaaagtctgcaagtggatattcagacctccttgaggccttcgttggaaacgggatttcttcatattctgctagacagaagaattctcagtaacttccttgtgttgtgtgtattcaactcacagagttgaatgatcctttacacagagcagacttgaaacactctttttgtggaatttgcaagtggagatttcagccgctttgaggtcaatggtagaataggaaatatcttcctatagaaactagacagaatgattctcagaaactcctttgcgatgtgtgcgttcaactcacagagtttaaccgttcttttcatagagcagttaggaaacactctgtttgtaaagcctgcaagggg
